(19) United States
(12) Patent Application Publication
(10) Pub. No.: US 2023/0256017 A1
(43) Pub. Date: Aug. 17, 2023

(54) METHODS OF MAKING CHIMERIC ANTIGEN RECEPTOR-EXPRESSING CELLS

(71) Applicants: Jennifer BROGDON, Cambridge, MA (US); Glenn DRANOFF, Cambridge, MA (US); Michael R. GREENE, Cambridge, MA (US); Anniesha HACK, East Hanover, NJ (US); Olja KODRASI, Quincy, MA (US); Elizabeth Dorothy PRATICO, East Boston, MA (US); Andrew PRICE, Cambridge, MA (US); Andrew Marc STEIN, Cambridge, MA (US); Amy RAYO, Cambridge, MA (US); Jennifer YANG, Cambridge, MA (US); Brian Walter GRANDA, Cambridge, MA (US); Novartis AG, Basel (CH)

(72) Inventors: Jennifer BROGDON, Sudbury, MA (US); Glenn DRANOFF, Sudbury, MA (US); Michael R. GREENE, Groton, MA (US); Anniesha HACK, East Hanover, NJ (US); Olja KODRASI, Quincy, MA (US); Elizabeth Dorothy PRATICO, East Boston, MA (US); Andrew PRICE, Cambridge, MA (US); Andrew Marc STEIN, Cambridge, MA (US); Amy RAYO, Cambridge, MA (US); Jennifer YANG, Somerville, MA (US); Brian Walter GRANDA, Salisbury, MA (US); Attilio BONDANZA, Basel (CH); Boris ENGELS, Arlington, MA (US); Hyungwook LIM, Cambridge, MA (US); Akash SOHONI, Cambridge, MA (US); Louise TREANOR, Cambridge, MA (US); Xu ZHU, Cambridge, MA (US); Carla GUIMARAES, Boston, MA (US); Shyamali JAYASHANKAR, Cambridge, MA (US); Sandeep Tharian KOSHY, Cambridge, MA (US); Regis CEBE, Basel (CH); Michael BARDROFF, Loerrach (DE); Sandra MILLER, Munich (DE)

(21) Appl. No.: 17/801,669

(22) PCT Filed: Feb. 26, 2021
(86) PCT No.: PCT/US2021/019889

§ 371 Date: Aug. 23, 2022

Related U.S. Application Data
(60) Provisional application No. 62/982,665, filed on Feb. 27, 2020.

(51) Int. Cl. A61K 35/17; A61P 35/00

(52) U.S. Cl. CPC A61K 35/17; A61P 35/00

(57) ABSTRACT

The invention provides methods of making immune effector cells (for example, T cells, NK cells) that express a chimeric antigen receptor (CAR), and compositions generated by such methods.

### RELATED APPLICATIONS

[0001] This application claims priority to U.S. Provisional Application 62/982,665 filed on Feb. 27, 2020, the entire contents of which are hereby incorporated by reference.

### SEQUENCE LISTING

[0002] The instant application contains a Sequence Listing which has been submitted electronically in ASCII format and is hereby incorporated by reference in its entirety. Said ASCII copy, created on Feb. 25, 2021, is named N2067-7170WO_SL.txt and is 653,029 bytes in size.

### FIELD OF THE INVENTION

[0003] The present invention relates generally to methods of making immune effector cells (for example, T cells or NK cells) engineered to express a Chimeric Antigen Receptor (CAR), and compositions comprising the same.

### BACKGROUND OF THE INVENTION

[0004] Adoptive cell transfer (ACT) therapy with T cells, especially with T cells transduced with Chimeric Antigen Receptors (CARs), has shown promise in several hematologic cancer trials. The manufacture of gene-modified T cells is currently a complex process. There exists a need for methods and processes to improve production of the CAR-expressing cell therapy product, enhance product quality, and maximize the therapeutic efficacy of the product.

### SUMMARY OF THE INVENTION

[0005] The present disclosure pertains to methods of making immune effector cells (for example, T cells or NK cells) engineered to express a CAR, and compositions generated using such methods. Also disclosed are methods of using such compositions for treating a disease, for example, cancer, in a subject.

[0006] In some aspects, the disclosure provides a method of making a population of cells (for example, T cells) that express a chimeric antigen receptor (CAR). The method comprises: (i) contacting (for example, binding) a population of cells (for example, T cells, for example, T cells isolated from a frozen or fresh leukapheresis product) with a multispecific binding molecule comprising (A) an anti-CD3 binding domain, and (B) a costimulatory molecule binding domain (e.g., an anti-CD2 binding domain or an anti-CD28 binding domain); (ii) contacting the population of cells (for example, T cells) with a nucleic acid molecule (for example, a DNA or RNA molecule) encoding the CAR, thereby providing a population of cells (for example, T cells) comprising the nucleic acid molecule, and (iii) harvesting the population of cells (for example, T cells) for storage (for example, reformulating the population of cells in cryopreservation media) or administration, wherein: (a) step (ii) is performed together with step (i) or no later than 20 hours after the beginning of step (i), for example, no later than 12, 13, 14, 15, 16, 17, or 18 hours after the beginning of step (i), for example, no later than 18 hours after the beginning of step (i), and step (iii) is performed no later than 26 hours after the beginning of step (i), for example, no later than 22, 23, 24, or 25 hours after the beginning of step (i), for example, no later than 24 hours after the beginning of step (i); (b) step (ii) is performed together with step (i) or no later than 20 hours after the beginning of step (i), for example, no later than 12, 13, 14, 15, 16, 17, or 18 hours after the beginning of step (i), for example, no later than 18 hours after the beginning of step (i), and step (iii) is performed no later than 30, 36, or 48 hours after the beginning of step (ii), for example, no later than 22, 23, 24, 25, 26, 27, 28, 29, 30, 31, 32, 33, 34, 35, 36, 37, 38, 39, 40, 41, 42, 43, 44, 45, 46, 47, 48 hours after the beginning of step (ii); or (c) the population of cells from step (iii) are not expanded, or expanded by no more than 5, 6, 7, 8, 9, 10, 11, 12, 13, 14, 15, 16, 17, 18, 19, 20, 25, 30, 35, or 40%, for example, no more than 10%, for example, as assessed by the number of living cells, compared to the population of cells at the beginning of step (i). In some embodiments, the nucleic acid molecule in step (ii) is a DNA molecule. In some embodiments, the nucleic acid molecule in step (ii) is an RNA molecule. In some embodiments, the nucleic acid molecule in step (ii) is on a viral vector, for example, a viral vector chosen from a lentivirus vector, an adenoviral vector, or a retrovirus vector. In some embodiments, the nucleic acid molecule in step (ii) is on a non-viral vector. In some embodiments, the nucleic acid molecule in step (ii) is on a plasmid. In some embodiments, the nucleic acid molecule in step (ii) is not on any vector. In some embodiments, step (ii) comprises transducing the population of cells (for example, T cells) with a viral vector comprising a nucleic acid molecule encoding the CAR.

[0007] In some aspects, the disclosure provides a multispecific binding molecule comprising (A) an anti-CD3 binding domain, and (B) a costimulatory molecule binding domain (e.g., an anti-CD2 binding domain or an anti-CD28 binding domain).

[0008] In some embodiments, the anti-CD3 binding domain, e.g., an anti-CD3 scFv, is situated N-terminal of the costimulatory molecule binding domain, e.g., an anti-CD2 Fab or an anti-CD28 Fab; or the anti-CD3 binding domain, e.g., an anti-CD3 scFv, is situated C-terminal of the costimulatory molecule binding domain, e.g., an anti-CD2 Fab or an anti-CD28 Fab, optionally wherein: an Fc region is situated between the anti-CD3 binding domain and the costimulatory molecule binding domain; or the multispecific binding molecule comprises a CH2, and the anti-CD3 binding domain is situated N-terminal of the CH2.

[0009] In some embodiments of the compositions and methods herein, the multispecific binding molecule comprises: (i) a first polypeptide comprising from N-terminal to C-terminal: VH of the anti-CD3 binding domain, VL of the anti-CD3 binding domain, VH of the costimulatory molecule binding domain, CH1, CH2, and CH3; and (ii) a second polypeptide comprising from N-terminal to C-terminal: VL of the costimulatory molecule binding domain and CL. In some embodiments, the multispecific binding molecule comprises: (i) a first polypeptide comprising from N-terminal to C-terminal: VH of the costimulatory molecule binding domain, CH1, CH2, CH3, VH of the anti-CD3 binding domain, and VL of the anti-CD3 binding domain; and (ii) a second polypeptide comprising from N-terminal to C-terminal: VL of the costimulatory molecule binding domain and CL. In some embodiments, the multispecific binding molecule comprises: (i) a first polypeptide comprising from N-terminal to C-terminal: VH of the costimulatory molecule binding domain, CH1, VH of the anti-CD3 binding domain, VL of the anti-CD3 binding domain, CH2, and CH3; and (ii) a second polypeptide comprising from N-terminal to C-terminal: VL of the costimulatory molecule binding domain and CL. In some embodiments, the anti-CD3 binding domain comprises an scFv and the costimulatory molecule binding domain is part of a Fab fragment.

[0010] In some embodiments, the anti-CD3 binding domain comprises: (i) a variable heavy chain region (VH) comprising a heavy chain complementarity determining region 1 (HCDR1), a HCDR2, and a HCDR3, and a light chain variable region (VL) comprising a light chain complementarity determining region 1 (LCDR1), a LCDR2, and a LCDR3 of an anti-CD3 antibody molecule of Table 27 (for example the anti-CD3 (1), anti-CD3 (2), anti-CD3 (3), or anti-CD3 (4)); and/or (ii) the amino acid sequence of any one of the VH and/or VL region of an anti-CD3 antibody molecule provided in Table 27 (for example the anti-CD3 (1), anti-CD3 (2), anti-CD3 (3), or anti-CD3 (4)), or an amino acid sequence at least 95% identical thereto.

[0011] In some embodiments, the costimulatory molecule binding domain is an anti-CD2 antigen binding domain. In some embodiments, the anti-CD2 antigen binding domain comprises: (i) a VH comprising a HCDR1, a HCDR2, and a HCDR3, and a VL comprising a LCDR1, a LCDR2, and a LCDR3 of an anti-CD2 antibody molecule of Table 27 (for example the anti-CD2 (1)); and/or (ii) the amino acid sequence of any one of the VH and/or VL region of an anti-CD2 antibody molecule provided in Table 27 (for example the anti-CD2 (1)), or an amino acid sequence at least 95% identical thereto.

[0012] In some embodiments, the costimulatory molecule binding domain is an anti-CD28 antigen binding domain. In some embodiments, the anti-CD28 antigen binding domain comprises: (i) a VH comprising a HCDR1, a HCDR2, and a HCDR3, and a VL comprising a LCDR1, a LCDR2, and a LCDR3 of an anti-CD28 antibody molecule of Table 27 (for example the anti-CD28 (1) or anti-CD28 (2)); and/or (ii) the amino acid sequence of any one of the VH and/or VL region of an anti-CD28 antibody molecule provided in Table 27 (for example the anti-CD28 (1) or anti-CD28 (2)), or an amino acid sequence at least 95% identical thereto.

[0013] In some embodiments, the anti-CD3 binding domain comprises an scFv. In some embodiments, the anti-CD3 binding domain comprises a VH linked to a VL by a peptide linker, e.g., a glycine-serine linker, e.g., a (G₄S)₄ linker. In some embodiments, the anti-CD3 binding domain comprises a VH and a VL, wherein the VH is N-terminal of the VL.

[0014] In some embodiments, the costimulatory molecule binding domain is part of a Fab fragment, e.g., a Fab fragment that is part of a polypeptide sequence that comprises an Fc domain, optionally wherein the Fc domain comprises an amino acid sequence provided in Table 28, or a sequence with at least 95% sequence identity thereto.

[0015] In some embodiments, the anti-CD3 binding domain is situated N-terminal of the costimulatory molecule binding domain. In some embodiments, the anti-CD3 binding domain is linked to the costimulatory molecule binding domain by a peptide linker, e.g., a glycine-serine linker, e.g., a (G4S)4 linker.

[0016] In some embodiments, the anti-CD3 binding domain is situated C-terminal of the costimulatory molecule binding domain, wherein optionally an Fc region is situated between the anti-CD3 binding domain and the costimulatory molecule binding domain.

[0017] In some embodiments, the multispecific binding molecule comprises a CH1. In some embodiments, the CH1 is C-terminal of the VH of the costimulatory molecule binding domain.

[0018] In some embodiments, the multispecific binding molecule comprises one or both of a CH2 and a CH3.

[0019] In some embodiments, the anti-CD3 binding domain is linked to the CH3 by a peptide linker, e.g., a glycine-serine linker, e.g., a (G4S)4 linker. In some embodiments, the anti-CD3 binding domain is situated C-terminal of the CH1. In some embodiments, the construct comprises a CH2, and the anti-CD3 binding domain is situated N-terminal of the CH2. In some embodiments, anti-CD3 binding domain is linked to the CH1 by a peptide linker, e.g., a glycine-serine linker, e.g., a (G4S)2 linker. In some embodiments, the anti-CD3 binding domain is linked to the CH2 by a peptide linker, e.g., a glycine-serine linker, e.g., a (G4S)4 linker.

[0020] In some embodiments, the multispecific binding molecule further comprises a CL. In some embodiments, the CL is C-terminal of the VL of the costimulatory molecule binding domain. In some embodiments, the CL domain is linked to the CH1, e.g., via a disulfide bridge.

[0021] In some embodiments, the multispecific binding molecule comprises: (i) the amino acid sequence of any heavy chain provided in Table 28, or an amino acid sequence with at least 95% sequence identity thereto; and/or (ii) the amino acid sequence of any light chain provided in Table 28, or an amino acid sequence with at least 95% sequence identity thereto.

[0022] In some embodiments, this invention features a method of making a population of cells (for example, T cells) that express a chimeric antigen receptor (CAR), the method comprising: (i) contacting (for example, binding) a population of cells (for example, T cells, for example, T cells isolated from a frozen or fresh leukapheresis product) with (A) an agent that stimulates a CD3/TCR complex and/or (B) an agent that stimulates a costimulatory molecule and/or growth factor receptor on the surface of the cells; (ii) contacting the population of cells (for example, T cells) with a nucleic acid molecule (for example, a DNA or RNA molecule) encoding the CAR, thereby providing a population of cells (for example, T cells) comprising the nucleic acid molecule, and (iii) harvesting the population of cells (for example, T cells) for storage (for example, reformulating the population of cells in cryopreservation media) or administration, wherein: (a) step (ii) is performed together with step (i) or no later than 20 hours after the beginning of step (i), for example, no later than 12, 13, 14, 15, 16, 17, or 18 hours after the beginning of step (i), for example, no later than 18 hours after the beginning of step (i), and step (iii) is performed no later than 26 hours after the beginning of step (i), for example, no later than 22, 23, 24, or 25 hours after the beginning of step (i), for example, no later than 24 hours after the beginning of step (i); (b) step (ii) is performed together with step (i) or no later than 20 hours after the beginning of step (i), for example, no later than 12, 13, 14, 15, 16, 17, or 18 hours after the beginning of step (i), for example, no later than 18 hours after the beginning of step (i), and step (iii) is performed no later than 30, 36, or 48 hours after the beginning of step (ii), for example, no later than 22, 23, 24, 25, 26, 27, 28, 29, 30, 31, 32, 33, 34, 35, 36, 37, 38, 39, 40, 41, 42, 43, 44, 45, 46, 47, 48 hours after the beginning of step (ii); or (c) the population of cells from step (iii) are not expanded, or expanded by no more than 5, 6, 7, 8, 9, 10, 11, 12, 13, 14, 15, 16, 17, 18, 19, 20, 25, 30, 35, or 40%, for example, no more than 10%, for example, as assessed by the number of living cells, compared to the population of cells at the beginning of step (i). In some embodiments, the nucleic acid molecule in step (ii) is a DNA molecule. In some embodiments, the nucleic acid molecule in step (ii) is an RNA molecule. In some embodiments, the nucleic acid molecule in step (ii) is on a viral vector, for example, a viral vector chosen from a lentivirus vector, an adenoviral vector, or a retrovirus vector. In some embodiments, the nucleic acid molecule in step (ii) is on a non-viral vector. In some embodiments, the nucleic acid molecule in step (ii) is on a plasmid. In some embodiments, the nucleic acid molecule in step (ii) is not on any vector. In some embodiments, step (ii) comprises transducing the population of cells (for example, T cells) with a viral vector comprising a nucleic acid molecule encoding the CAR. In some embodiments, step (ii) further comprises contacting the population of cells (for example, T cells) with shRNA that targets Tet2 comprising (A) a sense strand comprising a Tet2 target sequence and (B) an antisense strand complementary to the sense strand in whole or in part or a vector encoding the shRNA. In some embodiments, sense strand comprises the Tet2 target sequence GGGTAAGCCAAGAAAGAAA (SEQ ID NO: 418). In some embodiments, the anti-sense strand comprises the reverse complement thereof, i.e. TTTCTTTCTTGGCTTACCC (SEQ ID NO: 419). In some embodiments, the vector encoding the shRNA is the same or different from the vector encoding the CAR. In some embodiments, the vector encoding the shRNA sequence comprises promoter (such as but not limited to a U6 promoter), a sense strand comprising a Tet2 target sequence, a loop, an anti-sense strand complementary to the sense strand in whole or in part, and, optionally, a polyT tail, e.g. the sequences in Table 29. In some embodiments, step (ii) is performed together with step (i). In some embodiments, step (ii) is performed no later than 20 hours after the beginning of step (i). In some embodiments, step (ii) is performed no later than 12, 13, 14, 15, 16, 17, or 18 hours after the beginning of step (i). In some embodiments, step (ii) is performed no later than 18 hours after the beginning of step (i). In some embodiments, step (iii) is performed no later than 26 hours after the beginning of step (i). In some embodiments, step (iii) is performed no later than 22, 23, 24, or 25 hours after the beginning of step (i). In some embodiments, step (iii) is performed no later than 24 hours after the beginning of step (i). In some embodiments, step (iii) is performed no later than 30, 36, or 48 hours after the beginning of step (ii). In some embodiments, step (iii) is performed no later than 22, 23, 24, 25, 26, 27, 28, 29, 30, 31, 32, 33, 34, 35, 36, 37, 38, 39, 40, 41, 42, 43, 44, 45, 46, 47, 48 hours after the beginning of step (ii).

[0023] In some embodiments, the population of cells from step (iii) are not expanded. In some embodiments, the population of cells from step (iii) are expanded by no more than 5, 6, 7, 8, 9, 10, 11, 12, 13, 14, 15, 16, 17, 18, 19, 20, 25, 30, 35, or 40%, for example, as assessed by the number of living cells, compared to the population of cells at the beginning of step (i). In some embodiments, the population of cells from step (iii) are expanded by no more than 10%, for example, as assessed by the number of living cells, compared to the population of cells at the beginning of step (i).

[0024] In some embodiments, the agent that stimulates a CD3/TCR complex is an agent that stimulates CD3. In some embodiments, the agent that stimulates a costimulatory molecule and/or growth factor receptor is an agent that stimulates CD28, ICOS, CD27, HVEM, LIGHT, CD40, 4-1BB, OX40, DR3, GITR, CD30, TIM1, CD2, CD226, or any combination thereof. In some embodiments, the agent that stimulates a costimulatory molecule and/or growth factor receptor is an agent that stimulates CD28. In some embodiments, the agent that stimulates a CD3/TCR complex is chosen from an antibody (for example, a single-domain antibody (for example, a heavy chain variable domain antibody), a peptibody, a Fab fragment, or a scFv), a small molecule, or a ligand (for example, a naturally-existing, recombinant, or chimeric ligand). In some embodiments, the agent that stimulates a costimulatory molecule and/or growth factor receptor is chosen from an antibody (for example, a single-domain antibody (for example, a heavy chain variable domain antibody), a peptibody, a Fab fragment, or a scFv), a small molecule, or a ligand (for example, a naturally-existing, recombinant, or chimeric ligand). In some embodiments, the agent that stimulates a CD3/TCR complex does not comprise a bead. In some embodiments, the agent that stimulates a costimulatory molecule and/or growth factor receptor does not comprise a bead. In some embodiments, the agent that stimulates a CD3/TCR complex comprises an anti-CD3 antibody. In some embodiments, the agent that stimulates a costimulatory molecule and/or growth factor receptor comprises an anti-CD28 antibody. In some embodiments, the agent that stimulates a CD3/TCR complex comprises an anti-CD3 antibody covalently attached to a colloidal polymeric nanomatrix. In some embodiments, the agent that stimulates CD3 comprises one or more of a CD3 or TCR antigen binding domain, such as but not limited to an anti-CD3 or anti-TCR antibody or an antibody fragment comprising one or more CDRs, heavy chain, and/or light chain thereof -such as but not limited to an anti-CD3 or anti-TCR antibody provided in Table 27. In some embodiments, the agent that stimulates a costimulatory molecule and/or growth factor receptor comprises an anti-CD28 antibody covalently attached to a colloidal polymeric nanomatrix. In some embodiments, the agent that stimulates a costimulatory molecule and/or growth factor receptor is an agent that stimulates CD28, ICOS, CD27, CD25, 4-1BB, IL6RA, IL6RB, or CD2. In some embodiments, the agent that stimulates a costimulatory molecule and/or growth factor receptor comprises one or more of a CD28, ICOS, CD27, CD25, 4-1BB, IL6RB, and/or CD2 antigen binding domain, such as but not limited to an anti- CD28, anti-ICOS, anti-CD27, anti-CD25, anti-4-1BB, anti-IL6RA, anti-IL6RB, or anti-CD2 antibody or an antibody fragment comprising one or more CDRs, heavy chain, and/or light chain thereof - such as but not limited to an anti- CD28, anti-ICOS, anti-CD27, anti-CD25, anti-4-1BB, anti-IL6RA, anti-IL6RB, or anti-CD2 antibody provided in Table 27. In some embodiments, the agent that stimulates a CD3/TCR complex and the agent that stimulates a costimulatory molecule and/or growth factor receptor comprise T Cell TransAct™. In some embodiments, the agent that stimulates a CD3/TCR complex and the agent that stimulates a costimulatory molecule and/or growth factor receptor are comprised in a multispecific binding molecule. In some embodiments, the multispecific binding molecule comprises a CD3 antigen binding domain and a CD28 or CD2 antigen binding domain. In some embodiments, the multispecific binding molecules comprise one or more heavy and/or light chains - such as but not limited to the heavy and/or light chains provided in Table 28. In some embodiments, the multispecific binding molecule comprises a bispecific antibody. In some embodiments, the bispecific antibody is configured in any one of the schema provided in FIG. 50A. In some embodiments, the bispecific antibody is monovalent or bivalent. In some embodiments, the bispecific antibody comprises an Fc region. In some embodiments, the Fc region of the bispecific antibody is silenced. In some embodiments, the multispecific binding molecule comprises a plurality of bispecific antibodies. In some embodiments, one or more of the plurality of bispecific antibodies is monovalent. In some embodiments, one or more of the plurality of bispecific antibodies comprises an Fc region. In some embodiments, the Fc region of the one or more of the plurality of bispecific antibodies is silenced. In some embodiments, one or more of the plurality of bispecific antibodies are conjugated together into a multimer. In some embodiments, the multimer is configured in any one of the schema provided in FIG. 50B.

[0025] In some embodiments, the agent that stimulates a CD3/TCR complex does not comprise hydrogel. In some embodiments, the agent that stimulates a costimulatory molecule and/or growth factor receptor does not comprise hydrogel. In some embodiments, the agent that stimulates a CD3/TCR complex does not comprise alginate. In some embodiments, the agent that stimulates a costimulatory molecule and/or growth factor receptor does not comprise alginate.

[0026] In some embodiments, the agent that stimulates a CD3/TCR complex comprises hydrogel. In some embodiments, the agent that stimulates a costimulatory molecule and/or growth factor receptor comprises hydrogel. In some embodiments, the agent that stimulates a CD3/TCR complex comprises alginate. In some embodiments, the agent that stimulates a costimulatory molecule and/or growth factor receptor comprises alginate. In some embodiments, the agent that stimulates a CD3/TCR complex or the agent that stimulates a costimulatory molecule and/or growth factor receptor comprises MagCloudz™ from Quad Technologies.

[0027] In some embodiments, step (i) increases the percentage of CAR-expressing cells in the population of cells from step (iii), for example, the population of cells from step (iii) shows a higher percentage of CAR-expressing cells (for example, at least 10, 20, 30, 40, 50, or 60% higher), compared with cells made by an otherwise similar method without step (i).

[0028] In some embodiments, the percentage of naive cells, for example, naive T cells, for example, CD45RA+ CD45RO- CCR7+ T cells, in the population of cells from step (iii) is the same as the percentage of naive cells, for example, naive T cells, for example, CD45RA+ CD45RO- CCR7+ cells, in the population of cells at the beginning of step (i). In some embodiments, the percentage of naive cells, for example, naive T cells, for example, CD45RA+ CD45RO- CCR7+ T cells, in the population of cells from step (iii) differs by no more than 3, 4, 5, 6, 7, 8, 9, 10, 11, or 12% from the percentage of naive cells, for example, naive T cells, for example, CD45RA+ CD45RO- CCR7+ cells, in the population of cells at the beginning of step (i). In some embodiments, the percentage of naive cells, for example, naive T cells, for example, CD45RA+ CD45RO- CCR7+ T cells, in the population of cells from step (iii) differs by no more than 5 or 10% from the percentage of naive cells, for example, naive T cells, for example, CD45RA+ CD45RO- CCR7+ cells, in the population of cells at the beginning of step (i).

[0029] In some embodiments, the population of cells from step (iii) shows a higher percentage of naive cells, for example, naive T cells, for example, CD45RA+ CD45RO- CCR7+ T cells (for example, at least 10, 11, 12, 13, 14, 15, 16, 17, 18, 19, 20, 25, 30, 35, or 40% higher), compared with cells made by an otherwise similar method in which step (iii) is performed more than 26 hours after the beginning of step (i), for example, more than 5, 6, 7, 8, 9, 10, 11, or 12 days after the beginning of step (i). In some embodiments, the population of cells from step (iii) shows a higher percentage of naive cells, for example, naive T cells, for example, CD45RA+ CD45RO- CCR7+ T cells (for example, at least 10, 11, 12, 13, 14, 15, 16, 17, 18, 19, 20, 25, 30, 35, or 40% higher), compared with cells made by an otherwise similar method which further comprises, after step (ii) and prior to step (iii), expanding the population of cells (for example, T cells) in vitro for more than 3 days, for example, for 5, 6, 7, 8 or 9 days.

[0030] In some embodiments, the percentage of central memory cells, for example, central memory T cells, for example, CD95+ central memory T cells, in the population of cells from step (iii) is the same as the percentage of central memory cells, for example, central memory T cells, for example, CD95+ central memory T cells, in the population of cells at the beginning of step (i). In some embodiments, the percentage of central memory cells, for example, central memory T cells, for example, CD95+ central memory T cells, in the population of cells from step (iii) differs by no more than 3, 4, 5, 6, 7, 8, 9, 10, 11, or 12% from the percentage of central memory cells, for example, central memory T cells, for example, CD95+ central memory T cells, in the population of cells at the beginning of step (i). In some embodiments, the percentage of central memory cells, for example, central memory T cells, for example, CD95+ central memory T cells, in the population of cells from step (iii) differs by no more than 5 or 10% from the percentage of central memory cells, for example, central memory T cells, for example, CD95+ central memory T cells, in the population of cells at the beginning of step (i).

[0031] In some embodiments, the population of cells from step (iii) shows a lower percentage of central memory cells, for example, central memory T cells, for example, CD95+ central memory T cells (for example, at least 10, 11, 12, 13, 14, 15, 16, 17, 18, 19, 20, 25, 30, 35, or 40% lower), compared with cells made by an otherwise similar method in which step (iii) is performed more than 26 hours after the beginning of step (i), for example, more than 5, 6, 7, 8, 9, 10, 11, or 12 days after the beginning of step (i). In some embodiments, the population of cells from step (iii) shows a lower percentage of central memory cells, for example, central memory T cells, for example, CD95+ central memory T cells (for example, at least 10, 11, 12, 13, 14, 15, 16, 17, 18, 19, 20, 25, 30, 35, or 40% lower), compared with cells made by an otherwise similar method which further comprises, after step (ii) and prior to step (iii), expanding the population of cells (for example, T cells) in vitro for more than 3 days, for example, for 5, 6, 7, 8 or 9 days.

[0032] In some embodiments, the percentage of stem memory T cells, for example, CD45RA+CD95+IL-2 receptor β+CCR7+CD62L+ T cells, in the population of cells from step (iii) is increased, as compared to the percentage of stem memory T cells, for example, CD45RA+CD95+IL-2 receptor β+CCR7+CD62L+ T cells, in the population of cells at the beginning of step (i). In some embodiments, the percentage of CAR-expressing stem memory T cells, for example, CAR-expressing CD45RA+CD95+IL-2 receptor β+CCR7+CD62L+ T cells, in the population of cells from step (iii) is increased, as compared to the percentage of CAR-expressing stem memory T cells, for example, CAR-expressing CD45RA+CD95+IL-2 receptor β+CCR7+CD62L+ T cells, in the population of cells at the beginning of step (i). In some embodiments, the percentage of stem memory T cells, for example, CD45RA+CD95+IL-2 receptor β+CCR7+CD62L+ T cells, in the population of cells from step (iii) is higher than the percentage of stem memory T cells, for example, CD45RA+CD95+IL-2 receptor β+CCR7+CD62L+ T cells, in cells made by an otherwise similar method in which step (iii) is performed more than 26 hours after the beginning of step (i), for example, more than 5, 6, 7, 8, 9, 10, 11, or 12 days after the beginning of step (i). In some embodiments, the percentage of CAR-expressing stem memory T cells, for example, CAR-expressing CD45RA+CD95+IL-2 receptor β+CCR7+CD62L+ T cells, in the population of cells from step (iii) is higher than the percentage of CAR-expressing stem memory T cells, for example, CAR-expressing CD45RA+CD95+IL-2 receptor β+CCR7+CD62L+ T cells, in cells made by an otherwise similar method in which step (iii) is performed more than 26 hours after the beginning of step (i), for example, more than 5, 6, 7, 8, 9, 10, 11, or 12 days after the beginning of step (i). In some embodiments, the percentage of stem memory T cells, for example, CD45RA+CD95+IL-2 receptor β+CCR7+CD62L+ T cells, in the population of cells from step (iii) is higher than the percentage of stem memory T cells, for example, CD45RA+CD95+IL-2 receptor β+CCR7+CD62L+ T cells, in cells made by an otherwise similar method which further comprises, after step (ii) and prior to step (iii), expanding the population of cells (for example, T cells) in vitro for more than 3 days, for example, for 5, 6, 7, 8 or 9 days. In some embodiments, the percentage of CAR-expressing stem memory T cells, for example, CAR-expressing CD45RA+CD95+IL-2 receptor β+CCR7+CD62L+ T cells, in the population of cells from step (iii) is higher than the percentage of CAR-expressing stem memory T cells, for example, CAR-expressing CD45RA+CD95+IL-2 receptor β+CCR7+CD62L+ T cells, in cells made by an otherwise similar method which further comprises, after step (ii) and prior to step (iii), expanding the population of cells (for example, T cells) in vitro for more than 3 days, for example, for 5, 6, 7, 8 or 9 days.

[0033] In some embodiments, the median GeneSetScore (Up TEM vs. Down TSCM) of the population of cells from step (iii) is about the same as or differs by no more than (for example, increased by no more than) about 25, 50, 75, 100, or 125% from the median GeneSetScore (Up TEM vs. Down TSCM) of the population of cells at the beginning of step (i). In some embodiments, the median GeneSetScore (Up TEM vs. Down TSCM) of the population of cells from step (iii) is lower (for example, at least about 100, 150, 200, 250, or 300% lower) than the median GeneSetScore (Up TEM vs. Down TSCM) of cells made by an otherwise similar method in which step (iii) is performed more than 26 hours after the beginning of step (i), for example, more than 5, 6, 7, 8, 9, 10, 11, or 12 days after the beginning of step (i). In some embodiments, the median GeneSetScore (Up TEM vs. Down TSCM) of the population of cells from step (iii) is lower (for example, at least about 100, 150, 200, 250, or 300% lower) than the median GeneSetScore (Up TEM vs. Down TSCM) of cells made by an otherwise similar method which further comprises, after step (ii) and prior to step (iii), expanding the population of cells (for example, T cells) in vitro for more than 3 days, for example, for 5, 6, 7, 8 or 9 days. In some embodiments, the median GeneSetScore (Up Treg vs. Down Teff) of the population of cells from step (iii) is about the same as or differs by no more than (for example, increased by no more than) about 25, 50, 100, 150, or 200% from the median GeneSetScore (Up Treg vs. Down Teff) of the population of cells at the beginning of step (i). In some embodiments, the median GeneSetScore (Up Treg vs. Down Teff) of the population of cells from step (iii) is lower (for example, at least about 50, 100, 125, 150, or 175% lower) than the median GeneSetScore (Up Treg vs. Down Teff) of cells made by an otherwise similar method in which step (iii) is performed more than 26 hours after the beginning of step (i), for example, more than 5, 6, 7, 8, 9, 10, 11, or 12 days after the beginning of step (i). In some embodiments, the median GeneSetScore (Up Treg vs. Down Teff) of the population of cells from step (iii) is lower (for example, at least about 50, 100, 125, 150, or 175% lower) than the median GeneSetScore (Up Treg vs. Down Teff) of cells made by an otherwise similar method which further comprises, after step (ii) and prior to step (iii), expanding the population of cells (for example, T cells) in vitro for more than 3 days, for example, for 5, 6, 7, 8 or 9 days. In some embodiments, the median GeneSetScore (Down stemness) of the population of cells from step (iii) is about the same as or differs by no more than (for example, increased by no more than) about 25, 50, 100, 150, 200, or 250% from the median GeneSetScore (Down stemness) of the population of cells at the beginning of step (i). In some embodiments, the median GeneSetScore (Down stemness) of the population of cells from step (iii) is lower (for example, at least about 50, 100, or 125% lower) than the median GeneSetScore (Down stemness) of cells made by an otherwise similar method in which step (iii) is performed more than 26 hours after the beginning of step (i), for example, more than 5, 6, 7, 8, 9, 10, 11, or 12 days after the beginning of step (i). In some embodiments, the median GeneSetScore (Down stemness) of the population of cells from step (iii) is lower (for example, at least about 50, 100, or 125% lower) than the median GeneSetScore (Down stemness) of cells made by an otherwise similar method which further comprises, after step (ii) and prior to step (iii), expanding the population of cells (for example, T cells) in vitro for more than 3 days, for example, for 5, 6, 7, 8 or 9 days. In some embodiments, the median GeneSetScore (Up hypoxia) of the population of cells from step (iii) is about the same as or differs by no more than (for example, increased by no more than) about 125, 150, 175, or 200% from the median GeneSetScore (Up hypoxia) of the population of cells at the beginning of step (i). In some embodiments, the median GeneSetScore (Up hypoxia) of the population of cells from step (iii) is lower (for example, at least about 40, 50, 60, 70, or 80% lower) than the median GeneSetScore (Up hypoxia) of cells made by an otherwise similar method in which step (iii) is performed more than 26 hours after the beginning of step (i), for example, more than 5, 6, 7, 8, 9, 10, 11, or 12 days after the beginning of step (i). In some embodiments, the median GeneSetScore (Up hypoxia) of the population of cells from step (iii) is lower (for example, at least about 40, 50, 60, 70, or 80% lower) than the median GeneSetScore (Up hypoxia) of cells made by an otherwise similar method which further comprises, after step (ii) and prior to step (iii), expanding the population of cells (for example, T cells) in vitro for more than 3 days, for example, for 5, 6, 7, 8 or 9 days. In some embodiments, the median GeneSetScore (Up autophagy) of the population of cells from step (iii) is about the same as or differs by no more than (for example, increased by no more than) about 180, 190, 200, or 210% from the median GeneSetScore (Up autophagy) of the population of cells at the beginning of step (i). In some embodiments, the median GeneSetScore (Up autophagy) of the population of cells from step (iii) is lower (for example, at least 20, 30, or 40% lower) than the median GeneSetScore (Up autophagy) of cells made by an otherwise similar method in which step (iii) is performed more than 26 hours after the beginning of step (i), for example, more than 5, 6, 7, 8, 9, 10, 11, or 12 days after the beginning of step (i). In some embodiments, the median GeneSetScore (Up autophagy) of the population of cells from step (iii) is lower (for example, at least 20, 30, or 40% lower) than the median GeneSetScore (Up autophagy) of cells made by an otherwise similar method which further comprises, after step (ii) and prior to step (iii), expanding the population of cells (for example, T cells) in vitro for more than 3 days, for example, for 5, 6, 7, 8 or 9 days.

[0034] In some embodiments, the population of cells from step (iii), after being incubated with a cell expressing an antigen recognized by the CAR, secretes IL-2 at a higher level (for example, at least 2, 4, 6, 8, 10, 12, or 14-fold higher) than cells made by an otherwise similar method in which step (iii) is performed more than 26 hours after the beginning of step (i), for example, more than 5, 6, 7, 8, 9, 10, 11, or 12 days after the beginning of step (i), or cells made by an otherwise similar method which further comprises, after step (ii) and prior to step (iii), expanding the population of cells (for example, T cells) in vitro for more than 3 days, for example, for 5, 6, 7, 8 or 9 days, for example, as assessed using methods described in Example 8 with respect to FIGS. 29C-29D.

[0035] In some embodiments, the population of cells from step (iii), after being administered in vivo, persists longer or expands at a higher level (for example, at least 20, 25, 30, 35, 40, 45, 50, 55, 60, 65, 70, 75, 80, 85, or 90% higher) (for example, as assessed using methods described in Example 1 with respect to FIG. 4C), compared with cells made by an otherwise similar method in which step (iii) is performed more than 26 hours after the beginning of step (i), for example, more than 5, 6, 7, 8, 9, 10, 11, or 12 days after the beginning of step (i). In some embodiments, the population of cells from step (iii), after being administered in vivo, persists longer or expands at a higher level (for example, at least 20, 25, 30, 35, 40, 45, 50, 55, 60, 65, 70, 75, 80, 85, or 90% higher) (for example, as assessed using methods described in Example 1 with respect to FIG. 4C), compared with cells made by an otherwise similar method which further comprises, after step (ii) and prior to step (iii), expanding the population of cells (for example, T cells) in vitro for more than 3 days, for example, for 5, 6, 7, 8 or 9 days.

[0036] In some embodiments, the population of cells from step (iii), after being administered in vivo, shows a stronger anti-tumor activity (for example, a stronger anti-tumor activity at a low dose, for example, a dose no more than 0.15 × 10⁶, 0.2 × 10⁶, 0.25 × 10⁶, or 0.3 × 10⁶ viable CAR-expressing cells) than cells made by an otherwise similar method in which step (iii) is performed more than 26 hours after the beginning of step (i), for example, more than 5, 6, 7, 8, 9, 10, 11, or 12 days after the beginning of step (i), or cells made by an otherwise similar method which further comprises, after step (ii) and prior to step (iii), expanding the population of cells (for example, T cells) in vitro for more than 3 days, for example, for 5, 6, 7, 8 or 9 days.

[0037] In some embodiments, the population of cells from step (iii) are not expanded, for example, as assessed by the number of living cells, compared to the population of cells at the beginning of step (i). In some embodiments, the population of cells from step (iii) decreases from the number of living cells in the population of cells at the beginning of step (i), for example, as assessed by the number of living cells. In some embodiments, the population of cells from step (iii) are expanded by no more than 5, 6, 7, 8, 9, 10, 11, 12, 13, 14, 15, 16, 17, 18, 19, 20, 25, 30, 35, or 40%, for example, no more than 10%, for example, as assessed by the number of living cells, compared to the population of cells at the beginning of step (i). In some embodiments, the population of cells from step (iii) are not expanded, or expanded by less than 0.5, 1, 1.5, or 2 hours, for example, less than 1 or 1.5 hours, compared to the population of cells at the beginning of step (i).

[0038] In some embodiments, steps (i) and (ii) are performed in cell media (for example, serum-free media) comprising IL-2, IL-15 (for example, hetIL-15 (IL15/sIL-15Ra)), IL-6 (for example, IL-6/sIL-6Ra), a LSD1 inhibitor, or a MALT1 inhibitor. In some embodiments, steps (i) and (ii) are performed in cell media (for example, serum-free media) comprising IL-7, IL-21, or a combination thereof. In some embodiments, steps (i) and (ii) are performed in cell media (for example, serum-free media) comprising IL-2, IL-15 (for example, hetIL-15 (IL15/sIL-15Ra)), IL-21, IL-7, IL-6 (for example, IL-6/sIL-6Ra), a LSD1 inhibitor, a MALT1 inhibitor, or a combination thereof. In some embodiments, step (i) is performed in cell media (for example, serum-free media) comprising IL-2, IL-15 (for example, hetIL-15 (IL15/sIL-15Ra)), IL-6 (for example, IL-6/sIL-6Ra), a LSD1 inhibitor, or a MALT1 inhibitor. In some embodiments, step (ii) is performed in cell media (for example, serum-free media) comprising IL-2, IL-15 (for example, hetIL-15 (IL15/sIL-15Ra)), IL-6 (for example, IL-6/sIL-6Ra), a LSD1 inhibitor, or a MALT1 inhibitor. In some embodiments, step (i) is performed in cell media (for example, serum-free media) comprising IL-7, IL-21, or a combination thereof. In some embodiments, step (ii) is performed in cell media (for example, serum-free media) comprising IL-7, IL-21, or a combination thereof. In some embodiments, step (i) is performed in cell media (for example, serum-free media) comprising IL-2, IL-15 (for example, hetIL-15 (IL15/sIL-15Ra)), IL-21, IL-7, IL-6 (for example, IL-6/sIL-6Ra), a LSD1 inhibitor, a MALT1 inhibitor, or a combination thereof. In some embodiments, step (ii) is performed in cell media (for example, serum-free media) comprising IL-2, IL-15 (for example, hetIL-15 (IL15/sIL-15Ra)), IL-21, IL-7, IL-6 (for example, IL-6/sIL-6Ra), a LSD1 inhibitor, a MALT1 inhibitor, or a combination thereof. In some embodiments, the cell media is a serum-free media comprising a serum replacement. In some embodiments, the serum replacement is CTS™ Immune Cell Serum Replacement (ICSR).

[0039] In some embodiments, the aforementioned methods further comprise prior to step (i): (iv) receiving a fresh leukapheresis product (or an alternative source of hematopoietic tissue such as a fresh whole blood product, a fresh bone marrow product, or a fresh tumor or organ biopsy or removal (for example, a fresh product from thymectomy)) from an entity, for example, a laboratory, hospital, or healthcare provider.

[0040] In some embodiments, the aforementioned methods further comprise prior to step (i): (v) isolating the population of cells (for example, T cells, for example, CD8+ and/or CD4+ T cells) contacted in step (i) from a fresh leukapheresis product (or an alternative source of hematopoietic tissue such as a fresh whole blood product, a fresh bone marrow product, or a fresh tumor or organ biopsy or removal (for example, a fresh product from thymectomy)). In some embodiments, step (iii) is performed no later than 35, 36, or 48 hours after the beginning of step (v), for example, no later than 27, 28, 29, 30, 31, 32, 33, 34, 35, 36, 37, 38, 39, 40, 41, 42, 43, 44, 45, 46, 47, or 48 hours after the beginning of step (v), for example, no later than 30, 36, or 48 hours after the beginning of step (v). In some embodiments, the population of cells from step (iii) are not expanded, or expanded by no more than 5, 10, 15, 20, 25, 30, 35, or 40%, for example, no more than 10%, for example, as assessed by the number of living cells, compared to the population of cells at the end of step (v).

[0041] In some embodiments, the aforementioned methods further comprise prior to step (i): receiving cryopreserved T cells isolated from a leukapheresis product (or an alternative source of hematopoietic tissue such as cryopreserved T cells isolated from whole blood, bone marrow, or tumor or organ biopsy or removal (for example, thymectomy)) from an entity, for example, a laboratory, hospital, or healthcare provider.

[0042] In some embodiments, the aforementioned methods further comprise prior to step (i): (iv) receiving a cryopreserved leukapheresis product (or an alternative source of hematopoietic tissue such as a cryopreserved whole blood product, a cryopreserved bone marrow product, or a cryopreserved tumor or organ biopsy or removal (for example, a cryopreserved product from thymectomy)) from an entity, for example, a laboratory, hospital, or healthcare provider.

[0043] In some embodiments, the aforementioned methods further comprise prior to step (i): (v) isolating the population of cells (for example, T cells, for example, CD8+ and/or CD4+ T cells) contacted in step (i) from a cryopreserved leukapheresis product (or an alternative source of hematopoietic tissue such as a cryopreserved whole blood product, a cryopreserved bone marrow product, or a cryopreserved tumor or organ biopsy or removal (for example, a cryopreserved product from thymectomy)). In some embodiments, step (iii) is performed no later than 35, 36, or 48 hours after the beginning of step (v), for example, no later than 27, 28, 29, 30, 31, 32, 33, 34, 35,36, 37, 38, 39, 40, 41, 42, 43, 44, 45, 46, 47, or 48 hours after the beginning of step (v), for example, no later than 30, 36, or 38 hours after the beginning of step (v). In some embodiments, the population of cells from step (iii) are not expanded, or expanded by no more than 5, 10, 15, 20, 25, 30, 35, or 40%, for example, no more than 10%, for example, as assessed by the number of living cells, compared to the population of cells at the end of step (v).

[0044] In some embodiments, this invention features a method of making a population of cells (for example, T cells) that express a chimeric antigen receptor (CAR), the method comprising: (1) contacting a population of cells (for example, T cells, for example, T cells isolated from a frozen leukapheresis product) with a cytokine chosen from IL-2, IL-7, IL-15, IL-21, IL-6, or a combination thereof, (2) contacting the population of cells (for example, T cells) with a nucleic acid molecule (for example, a DNA or RNA molecule) encoding the CAR, thereby providing a population of cells (for example, T cells) comprising the nucleic acid molecule, and (3) harvesting the population of cells (for example, T cells) for storage (for example, reformulating the population of cells in cryopreservation media) or administration, wherein: (a) step (2) is performed together with step (1) or no later than 5 hours after the beginning of step (1), for example, no later than 1, 2, 3, 4, or 5 hours after the beginning of step (1), and step (3) is performed no later than 26 hours after the beginning of step (1), for example, no later than 22, 23, 24, or 25 hours after the beginning of step (1), for example, no later than 24 hours after the beginning of step (1), or (b) the population of cells from step (3) are not expanded, or expanded by no more than 5, 10, 15, 20, 25, 30, 35, or 40%, for example, no more than 10%, for example, as assessed by the number of living cells, compared to the population of cells at the beginning of step (1). In some embodiments, the nucleic acid molecule in step (2) is a DNA molecule. In some embodiments, the nucleic acid molecule in step (2) is an RNA molecule. In some embodiments, the nucleic acid molecule in step (2) is on a viral vector, for example, a viral vector chosen from a lentivirus vector, an adenoviral vector, or a retrovirus vector. In some embodiments, the nucleic acid molecule in step (2) is on a non-viral vector. In some embodiments, the nucleic acid molecule in step (2) is on a plasmid. In some embodiments, the nucleic acid molecule in step (2) is not on any vector. In some embodiments, step (2) comprises contacting, optionally transducing, the population of cells (for example, T cells) with a viral vector comprising a nucleic acid molecule encoding the CAR. In some embodiments, step (2) further comprises contacting the population of cells (for example, T cells) with shRNA that targets Tet2 comprising (A) a sense strand comprising a Tet2 target sequence and (B) an antisense strand complementary to the sense strand in whole or in part or a vector encoding the shRNA. In some embodiments, sense strand comprises the Tet2 target sequence GGGTAAGCCAAGAAAGAAA (SEQ ID NO: 418). In some embodiments, the anti-sense strand comprises the reverse complement thereof, i.e. TTTCTTTCTTGGCTTACCC (SEQ ID NO: 419). In some embodiments, the vector encoding the shRNA is the same or different from the vector encoding the CAR. In some embodiments, the vector encoding the shRNA sequence comprises promoter (such as but not limited to a U6 promoter), a sense strand comprising a Tet2 target sequence, a loop, an anti-sense strand complementary to the sense strand in whole or in part, and, optionally, a polyT tail, e.g. the sequences in Table 29.

[0045] In some embodiments, step (2) is performed together with step (1). In some embodiments, step (2) is performed no later than 5 hours after the beginning of step (1). In some embodiments, step (2) is performed no later than 1, 2, 3, 4, or 5 hours after the beginning of step (1). In some embodiments, step (3) is performed no later than 26 hours after the beginning of step (1). In some embodiments, step (3) is performed no later than 22, 23, 24, or 25 hours after the beginning of step (1). In some embodiments, step (3) is performed no later than 24 hours after the beginning of step (1).

[0046] In some embodiments, the population of cells from step (3) are not expanded, for example, as assessed by the number of living cells, compared to the population of cells at the beginning of step (1). In some embodiments, the population of cells from step (3) are expanded by no more than 5, 6, 7, 8, 9, 10, 11, 12, 13, 14, 15, 16, 17, 18, 19, 20, 25, 30, 35, or 40%, for example, as assessed by the number of living cells, compared to the population of cells at the beginning of step (1). In some embodiments, the population of cells from step (3) are expanded by no more than 10%, for example, as assessed by the number of living cells, compared to the population of cells at the beginning of step (1).

[0047] In some embodiments, step (1) comprises contacting the population of cells (for example, T cells) with IL-2. In some embodiments, step (1) comprises contacting the population of cells (for example, T cells) with IL-7. In some embodiments, step (1) comprises contacting the population of cells (for example, T cells) with IL-15 (for example, hetIL-15 (IL15/sIL-15Ra)). In some embodiments, step (1) comprises contacting the population of cells (for example, T cells) with IL-21. In some embodiments, step (1) comprises contacting the population of cells (for example, T cells) with IL-6 (for example, IL-6/sIL-6Ra). In some embodiments, step (1) comprises contacting the population of cells (for example, T cells) with IL-2 and IL-7. In some embodiments, step (1) comprises contacting the population of cells (for example, T cells) with IL-2 and IL-15 (for example, hetIL-15 (IL15/sIL-15Ra)). In some embodiments, step (1) comprises contacting the population of cells (for example, T cells) with IL-2 and IL-21. In some embodiments, step (1) comprises contacting the population of cells (for example, T cells) with IL-2 and IL-6 (for example, IL-6/sIL-6Ra). In some embodiments, step (1) comprises contacting the population of cells (for example, T cells) with IL-7 and IL-15 (for example, hetIL-15 (IL15/sIL-15Ra)). In some embodiments, step (1) comprises contacting the population of cells (for example, T cells) with IL-7 and IL-21. In some embodiments, step (1) comprises contacting the population of cells (for example, T cells) with IL-7 and IL-6 (for example, IL-6/sIL-6Ra). In some embodiments, step (1) comprises contacting the population of cells (for example, T cells) with IL-15 (for example, hetIL-15 (IL15/sIL-15Ra)) and IL-21. In some embodiments, step (1) comprises contacting the population of cells (for example, T cells) with IL-15 (for example, hetIL-15 (IL15/sIL-15Ra)) and IL-6 (for example, IL-6/sIL-6Ra). In some embodiments, step (1) comprises contacting the population of cells (for example, T cells) with IL-21 and IL-6 (for example, IL-6/sIL-6Ra). In some embodiments, step (1) comprises contacting the population of cells (for example, T cells) with IL-7, IL-15 (for example, hetIL-15 (IL15/sIL-15Ra)), and IL-21.

[0048] In some embodiments, the population of cells from step (3) shows a higher percentage of naive cells among CAR-expressing cells (for example, at least 10, 11, 12, 13, 14, 15, 16, 17, 18, 19, 20, 25, 30, 35, or 40% higher), compared with cells made by an otherwise similar method which further comprises contacting the population of cells with, for example, an anti-CD3 antibody.

[0049] In some embodiments, the percentage of naive cells, for example, naive T cells, for example, CD45RA+ CD45RO- CCR7+ T cells, in the population of cells from step (3) is the same as the percentage of naive cells, for example, naive T cells, for example, CD45RA+ CD45RO- CCR7+ cells, in the population of cells at the beginning of step (1). In some embodiments, the percentage of naive cells, for example, naive T cells, for example, CD45RA+ CD45RO- CCR7+ T cells, in the population of cells from step (3) differs by no more than 3, 4, 5, 6, 7, 8, 9, 10, 11, or 12% from the percentage of naive cells, for example, naive T cells, for example, CD45RA+ CD45RO- CCR7+ cells, in the population of cells at the beginning of step (1). In some embodiments, the percentage of naive cells, for example, naive T cells, for example, CD45RA+ CD45RO- CCR7+ T cells, in the population of cells from step (3) differs by no more than 5 or 10% from the percentage of naive cells, for example, naive T cells, for example, CD45RA+ CD45RO- CCR7+ cells, in the population of cells at the beginning of step (1). In some embodiments, the percentage of naive cells, for example, naive T cells, for example, CD45RA+ CD45RO- CCR7+ T cells, in the population of cells from step (3) is increased as compared to the percentage of naive cells, for example, naive T cells, for example, CD45RA+ CD45RO- CCR7+ cells, in the population of cells at the beginning of step (1). In some embodiments, the percentage of naive cells, for example, naive T cells, for example, CD45RA+ CD45RO- CCR7+ T cells, in the population of cells from step (3) is increased by at least 10, 11, 12, 13, 14, 15, 16, 17, 18, 19, or 20%, as compared to the percentage of naive cells, for example, naive T cells, for example, CD45RA+ CD45RO- CCR7+ cells, in the population of cells at the beginning of step (1). In some embodiments, the percentage of naive cells, for example, naive T cells, for example, CD45RA+ CD45RO- CCR7+ T cells, in the population of cells from step (3) is increased by at least 10 or 20%, as compared to the percentage of naive cells, for example, naive T cells, for example, CD45RA+ CD45RO-CCR7+ cells, in the population of cells at the beginning of step (1).

[0050] In some embodiments, the population of cells from step (3) shows a higher percentage of naive cells, for example, naive T cells, for example, CD45RA+ CD45RO- CCR7+ T cells (for example, at least 10, 11, 12, 13, 14, 15, 16, 17, 18, 19, 20, 25, 30, 35, or 40% higher), compared with cells made by an otherwise similar method in which step (3) is performed more than 26 hours after the beginning of step (1), for example, more than 5, 6, 7, 8, 9, 10, 11, or 12 days after the beginning of step (1). In some embodiments, the population of cells from step (3) shows a higher percentage of naive cells, for example, naive T cells, for example, CD45RA+ CD45RO- CCR7+ T cells (for example, at least 10, 11, 12, 13, 14, 15, 16, 17, 18, 19, 20, 25, 30, 35, or 40% higher), compared with cells made by an otherwise similar method which further comprises, after step (2) and prior to step (3), expanding the population of cells (for example, T cells) in vitro for more than 3 days, for example, for 5, 6, 7, 8 or 9 days.

[0051] In some embodiments, the percentage of central memory cells, for example, central memory T cells, for example, CD95+ central memory T cells, in the population of cells from step (3) is the same as the percentage of central memory cells, for example, central memory T cells, for example, CD95+ central memory T cells, in the population of cells at the beginning of step (i). In some embodiments, the percentage of central memory cells, for example, central memory T cells, for example, CD95+ central memory T cells, in the population of cells from step (3) differs by no more than 3, 4, 5, 6, 7, 8, 9, 10, 11, or 12% from the percentage of central memory cells, for example, central memory T cells, for example, CD95+ central memory T cells, in the population of cells at the beginning of step (i). In some embodiments, the percentage of central memory cells, for example, central memory T cells, for example, CD95+ central memory T cells, in the population of cells from step (3) differs by no more than 5 or 10% from the percentage of central memory cells, for example, central memory T cells, for example, CD95+ central memory T cells, in the population of cells at the beginning of step (i). In some embodiments, the percentage of central memory cells, for example, central memory T cells, for example, CD95+ central memory T cells, in the population of cells from step (3) is decreased as compared to the percentage of central memory cells, for example, central memory T cells, for example, CD95+ central memory T cells, in the population of cells at the beginning of step (1). In some embodiments, the percentage of central memory cells, for example, central memory T cells, for example, CD95+ central memory T cells, in the population of cells from step (3) is decreased by at least 10 or 20%, as compared to the percentage of central memory cells, for example, central memory T cells, for example, CD95+ central memory T cells, in the population of cells at the beginning of step (1). In some embodiments, the percentage of central memory cells, for example, central memory T cells, for example, CD95+ central memory T cells, in the population of cells from step (3) is decreased by at least 10, 11, 12, 13, 14, 15, 16, 17, 18, 19, or 20%, as compared to the percentage of central memory cells, for example, central memory T cells, for example, CD95+ central memory T cells, in the population of cells at the beginning of step (1).

[0052] In some embodiments, the population of cells from step (3) shows a lower percentage of central memory cells, for example, central memory T cells, for example, CD95+ central memory T cells (for example, at least 10, 11, 12, 13, 14, 15, 16, 17, 18, 19, 20, 25, 30, 35, or 40% lower), compared with cells made by an otherwise similar method in which step (3) is performed more than 26 hours after the beginning of step (1), for example, more than 5, 6, 7, 8, 9, 10, 11, or 12 days after the beginning of step (1). In some embodiments, the population of cells from step (3) shows a lower percentage of central memory cells, for example, central memory T cells, for example, CD95+ central memory T cells (for example, at least 10, 11, 12, 13, 14, 15, 16, 17, 18, 19, 20, 25, 30, 35, or 40% lower), compared with cells made by an otherwise similar method which further comprises, after step (2) and prior to step (3), expanding the population of cells (for example, T cells) in vitro for more than 3 days, for example, for 5, 6, 7, 8 or 9 days.

[0053] In some embodiments, the population of cells from step (3), after being administered in vivo, persists longer or expands at a higher level (for example, at least 20, 25, 30, 35, 40, 45, 50, 55, 60, 65, 70, 75, 80, 85, or 90% higher) (for example, as assessed using methods described in Example 1 with respect to FIG. 4C), compared with cells made by an otherwise similar method in which step (3) is performed more than 26 hours after the beginning of step (1), for example, more than 5, 6, 7, 8, 9, 10, 11, or 12 days after the beginning of step (1). In some embodiments, the population of cells from step (3), after being administered in vivo, persists longer or expands at a higher level (for example, at least 20, 25, 30, 35, 40, 45, 50, 55, 60, 65, 70, 75, 80, 85, or 90% higher) (for example, as assessed using methods described in Example 1 with respect to FIG. 4C), compared with cells made by an otherwise similar method which further comprises, after step (2) and prior to step (3), expanding the population of cells (for example, T cells) in vitro for more than 3 days, for example, for 5, 6, 7, 8 or 9 days.

[0054] In some embodiments, the population of cells from step (3) are not expanded, for example, as assessed by the number of living cells, compared to the population of cells at the beginning of step (1). In some embodiments, the population of cells from step (3) are expanded by no more than 5, 6, 7, 8, 9, 10, 11, 12, 13, 14, 15, 16, 17, 18, 19, 20, 25, 30, 35, or 40%, for example, as assessed by the number of living cells, compared to the population of cells at the beginning of step (1). In some embodiments, the population of cells from step (3) are expanded by no more than 10%, for example, as assessed by the number of living cells, compared to the population of cells at the beginning of step (1). In some embodiments, the number of living cells in the population of cells from step (3) decreases from the number of living cells in the population of cells at the beginning of step (1), for example, as assessed by the number of living cells.

[0055] In some embodiments, the population of cells from step (3) are not expanded compared to the population of cells at the beginning of step (1), for example, as assessed by the number of living cells. In some embodiments, the population of cells from step (3) are expanded by less than 0.5, 1, 1.5, or 2 hours, for example, less than 1 or 1.5 hours, compared to the population of cells at the beginning of step (1).

[0056] In some embodiments, the population of cells is not contacted in vitro with (A) an agent that stimulates a CD3/TCR complex and/or (B) an agent that stimulates a costimulatory molecule and/or growth factor receptor on the surface of the cells, or if contacted, the contacting step is less than 2 hours, for example, no more than 1 or 1.5 hours. In some embodiments, the agent that stimulates a CD3/TCR complex is an agent that stimulates CD3 (for example, an anti-CD3 antibody). In some embodiments, the agent that stimulates a costimulatory molecule and/or growth factor receptor is an agent that stimulates CD28, ICOS, CD27, HVEM, LIGHT, CD40, 4-1BB, OX40, DR3, GITR, CD30, TIM1, CD2, CD226, or any combination thereof. In some embodiments, the agent that stimulates a costimulatory molecule and/or growth factor receptor is an agent that stimulates CD28. In some embodiments, the agent that stimulates a CD3/TCR complex or the agent that stimulates a costimulatory molecule and/or growth factor receptor is chosen from an antibody (for example, a single-domain antibody (for example, a heavy chain variable domain antibody), a peptibody, a Fab fragment, or a scFv), a small molecule, or a ligand (for example, a naturally-existing, recombinant, or chimeric ligand).

[0057] In some embodiments, steps (1) and/or (2) are performed in cell media comprising no more than 5, 4, 3, 2, 1, or 0% serum. In some embodiments, steps (1) and/or (2) are performed in cell media comprising no more than 2% serum. In some embodiments, steps (1) and/or (2) are performed in cell media comprising about 2% serum. In some embodiments, steps (1) and/or (2) are performed in cell media comprising a LSD1 inhibitor or a MALT1 inhibitor. In some embodiments, step (1) is performed in cell media comprising no more than 5, 4, 3, 2, 1, or 0% serum. In some embodiments, step (1) is performed in cell media comprising no more than 2% serum. In some embodiments, step (1) is performed in cell media comprising about 2% serum. In some embodiments, step (2) is performed in cell media comprising no more than 5, 4, 3, 2, 1, or 0% serum. In some embodiments, step (2) is performed in cell media comprising no more than 2% serum. In some embodiments, step (2) is performed in cell media comprising about 2% serum. In some embodiments, step (1) is performed in cell media comprising a LSD1 inhibitor or a MALT1 inhibitor. In some embodiments, step (2) is performed in cell media comprising a LSD1 inhibitor or a MALT1 inhibitor.

[0058] In some embodiments, the aforementioned methods further comprise prior to step (i): (iv) receiving a fresh leukapheresis product (or an alternative source of hematopoietic tissue such as a fresh whole blood product, a fresh bone marrow product, or a fresh tumor or organ biopsy or removal (for example, a fresh product from thymectomy)) from an entity, for example, a laboratory, hospital, or healthcare provider.

[0059] In some embodiments, the aforementioned methods further comprise prior to step (i): (v) isolating the population of cells (for example, T cells, for example, CD8+ and/or CD4+ T cells) contacted in step (i) from a fresh leukapheresis product (or an alternative source of hematopoietic tissue such as a fresh whole blood product, a fresh bone marrow product, or a fresh tumor or organ biopsy or removal (for example, a fresh product from thymectomy)). In some embodiments, step (iii) is performed no later than 35, 36, or 48 hours after the beginning of step (v), for example, no later than 27, 28, 29, 30, 31, 32, 33, 34, 35, 36, 37, 38, 39, 40, 41, 42, 43, 44, 45, 46, 47, or 48 hours after the beginning of step (v), for example, no later than 30, 36, or 48 hours after the beginning of step (v). In some embodiments, the population of cells from step (iii) are not expanded, or expanded by no more than 5, 10, 15, 20, 25, 30, 35, or 40%, for example, no more than 10%, for example, as assessed by the number of living cells, compared to the population of cells at the end of step (v).

[0060] In some embodiments, the aforementioned methods further comprise prior to step (i): receiving cryopreserved T cells isolated from a leukapheresis product (or an alternative source of hematopoietic tissue such as cryopreserved T cells isolated from whole blood, bone marrow, or tumor or organ biopsy or removal (for example, thymectomy)) from an entity, for example, a laboratory, hospital, or healthcare provider.

[0061] In some embodiments, the aforementioned methods further comprise prior to step (i): (iv) receiving a cryopreserved leukapheresis product (or an alternative source of hematopoietic tissue such as a cryopreserved whole blood product, a cryopreserved bone marrow product, or a cryopreserved tumor or organ biopsy or removal (for example, a cryopreserved product from thymectomy)) from an entity, for example, a laboratory, hospital, or healthcare provider.

[0062] In some embodiments, the aforementioned methods further comprise prior to step (i): (v) isolating the population of cells (for example, T cells, for example, CD8+ and/or CD4+ T cells) contacted in step (i) from a cryopreserved leukapheresis product (or an alternative source of hematopoietic tissue such as a cryopreserved whole blood product, a cryopreserved bone marrow product, or a cryopreserved tumor or organ biopsy or removal (for example, a cryopreserved product from thymectomy)). In some embodiments, step (iii) is performed no later than 35, 36, or 48 hours after the beginning of step (v), for example, no later than 27, 28, 29, 30, 31, 32, 33, 34, 35, 36, 37, 38, 39, 40, 41, 42, 43, 44, 45, 46, 47, or 48 hours after the beginning of step (v), for example, no later than 30, 36, or 48 hours after the beginning of step (v). In some embodiments, the population of cells from step (iii) are not expanded, or expanded by no more than 5, 10, 15, 20, 25, 30, 35, or 40%, for example, no more than 10%, for example, as assessed by the number of living cells, compared to the population of cells at the end of step (v).

[0063] In some embodiments, the population of cells at the beginning of step (i) or step (1) has been enriched for IL6R-expressing cells (for example, cells that are positive for IL6Rα and/or IL6Rβ). In some embodiments, the population of cells at the beginning of step (i) or step (1) comprises no less than 40, 45, 50, 55, 60, 65, or 70% of IL6R-expressing cells (for example, cells that are positive for IL6Rα and/or IL6Rβ).

[0064] In some embodiments, steps (i) and (ii) or steps (1) and (2) are performed in cell media comprising IL-15 (for example, hetIL-15 (IL15/sIL-15Ra)). In some embodiments, IL-15 increases the ability of the population of cells to expand, for example, 10, 15, 20, or 25 days later. In some embodiments, IL-15 increases the percentage of IL6Rβ-expressing cells in the population of cells.

[0065] In some embodiments of the aforementioned methods, the methods are performed in a closed system. In some embodiments, T cell separation, activation, transduction, incubation, and washing are all performed in a closed system. In some embodiments of the aforementioned methods, the methods are performed in separate devices. In some embodiments, T cell separation, activation and transduction, incubation, and washing are performed in separate devices.

[0066] In some embodiments of the aforementioned methods, the methods further comprise adding an adjuvant or a transduction enhancement reagent in the cell culture medium to enhance transduction efficiency. In some embodiments, the adjuvant or transduction enhancement reagent comprises a cationic polymer. In some embodiments, the adjuvant or transduction enhancement reagent is chosen from: LentiBOOST™ (Sirion Biotech), vectofusin-1, F108 (Poloxamer 338 or Pluronic® F-38), protamine sulfate, hexadimethrine bromide (Polybrene), PEA, Pluronic F68, Pluronic F127, Synperonic or LentiTrans™. In some embodiments, the transduction enhancement reagent is LentiBOOST™ (Sirion Biotech). In some embodiments, the transduction enhancement reagent is F108 (Poloxamer 338 or Pluronic® F-38).

[0067] In some embodiments of the aforementioned methods, the transducing the population of cells (for example, T cells) with a viral vector comprises subjecting the population of cells and viral vector to a centrifugal force under conditions such that transduction efficiency is enhanced. In an embodiment, the cells are transduced by spinoculation.

[0068] In some embodiments of the aforementioned methods, cells (e.g., T cells) are activated and transduced in a cell culture flask comprising a gas-permeable membrane at the base that supports large media volumes without substantially compromising gas exchange. In some embodiments, cell growth is achieved by providing access, e.g., substantially uninterrupted access, to nutrients through convection.

[0069] In some embodiments of the aforementioned methods, the CAR comprises an antigen binding domain, a transmembrane domain, and an intracellular signaling domain.

[0070] In some embodiments, the antigen binding domain binds to an antigen chosen from: CD19, CD20, CD22, BCMA, mesothelin, EGFRvIII, GD2, Tn antigen, sTn antigen, Tn-O-Glycopeptides, sTn-O-Glycopeptides, PSMA, CD97, TAG72, CD44v6, CEA, EPCAM, KIT, IL-13Ra2, leguman, GD3, CD171, IL-11Ra, PSCA, MAD-CT-1, MAD-CT-2, VEGFR2, LewisY, CD24, PDGFR-beta, SSEA-4, folate receptor alpha, ERBBs (for example, ERBB2), Her2/neu, MUC1, EGFR, NCAM, Ephrin B2, CAIX, LMP2, sLe, HMWMAA, o-acetyl-GD2, folate receptor beta, TEM1/CD248, TEM7R, FAP, Legumain, HPV E6 or E7, ML-IAP, CLDN6, TSHR, GPRC5D, ALK, Polysialic acid, Fos-related antigen, neutrophil elastase, TRP-2, CYP1B 1, sperm protein 17, beta human chorionic gonadotropin, AFP, thyroglobulin, PLAC1, globoH, RAGE1, MN-CA IX, human telomerase reverse transcriptase, intestinal carboxyl esterase, mut hsp 70-2, NA-17, NY-BR-1, UPK2, HAVCR1, ADRB3, PANX3, NY-ESO-1, GPR20, Ly6k, OR51E2, TARP, GFRα4, or a peptide of any of these antigens presented on MHC. In some embodiments, the antigen binding domain comprises a CDR, VH, VL, scFv or a CAR sequence disclosed herein. In some embodiments, the antigen binding domain comprises a VH and a VL, wherein the VH and VL are connected by a linker, optionally wherein the linker comprises the amino acid sequence of SEQ ID NO: 63 or 104.

[0071] In some embodiments, the transmembrane domain comprises a transmembrane domain of a protein chosen from the alpha, beta or zeta chain of T-cell receptor, CD28, CD3 epsilon, CD45, CD4, CD5, CD8, CD9, CD16, CD22, CD33, CD37, CD64, CD80, CD86, CD134, CD137 and CD154. In some embodiments, the transmembrane domain comprises a transmembrane domain of CD8. In some embodiments, the transmembrane domain comprises the amino acid sequence of SEQ ID NO: 6, or an amino acid sequence having at least about 85%, 90%, 95%, or 99% sequence identity thereof. In some embodiments, the nucleic acid molecule comprises a nucleic acid sequence encoding the transmembrane domain, wherein the nucleic acid sequence comprises the nucleic acid sequence of SEQ ID NO: 17, or a nucleic acid sequence having at least about 85%, 90%, 95%, or 99% sequence identity thereof.

[0072] In some embodiments, the antigen binding domain is connected to the transmembrane domain by a hinge region. In some embodiments, the hinge region comprises the amino acid sequence of SEQ ID NO: 2, 3, or 4, or an amino acid sequence having at least about 85%, 90%, 95%, or 99% sequence identity thereof. In some embodiments, the nucleic acid molecule comprises a nucleic acid sequence encoding the hinge region, wherein the nucleic acid sequence comprises the nucleic acid sequence of SEQ ID NO: 13, 14, or 15, or a nucleic acid sequence having at least about 85%, 90%, 95%, or 99% sequence identity thereof.

[0073] In some embodiments, the intracellular signaling domain comprises a primary signaling domain. In some embodiments, the primary signaling domain comprises a functional signaling domain derived from CD3 zeta, TCR zeta, FcR gamma, FcR beta, CD3 gamma, CD3 delta, CD3 epsilon, CD5, CD22, CD79a, CD79b, CD278 (ICOS), FcεRI, DAP10, DAP12, or CD66d. In some embodiments, the primary signaling domain comprises a functional signaling domain derived from CD3 zeta. In some embodiments, the primary signaling domain comprises the amino acid sequence of SEQ ID NO: 9 or 10, or an amino acid sequence having at least about 85%, 90%, 95%, or 99% sequence identity thereof. In some embodiments, the nucleic acid molecule comprises a nucleic acid sequence encoding the primary signaling domain, wherein the nucleic acid sequence comprises the nucleic acid sequence of SEQ ID NO: 20 or 21, or a nucleic acid sequence having at least about 85%, 90%, 95%, or 99% sequence identity thereof.

[0074] In some embodiments, the intracellular signaling domain comprises a costimulatory signaling domain. In some embodiments, the costimulatory signaling domain comprises a functional signaling domain derived from a MHC class I molecule, a TNF receptor protein, an Immunoglobulin-like protein, a cytokine receptor, an integrin, a signaling lymphocytic activation molecule (SLAM protein), an activating NK cell receptor, BTLA, a Toll ligand receptor, OX40, CD2, CD7, CD27, CD28, CD30, CD40, CDS, ICAM-1, 4-1BB (CD137), B7-H3, ICOS (CD278), GITR, BAFFR, LIGHT, HVEM (LIGHTR), KIRDS2, SLAMF7, NKp80 (KLRF1), NKp44, NKp30, NKp46, CD19, CD4, CD8alpha, CD8beta, IL2R beta, IL2R gamma, IL7R alpha, ITGA4, VLA1, CD49a, ITGA4, IA4, CD49D, ITGA6, VLA-6, CD49f, ITGAD, CD11d, ITGAE, CD103, ITGAL, CD11a, LFA-1, ITGAM, CD11b, ITGAX, CD11c, ITGB1, CD29, ITGB2, CD18, ITGB7, NKG2D, NKG2C, TNFR2, TRANCE/RANKL, DNAM1 (CD226), SLAMF4 (CD244, 2B4), CD84, CD96 (Tactile), CEACAM1, CRTAM, Ly9 (CD229), CD160 (BY55), PSGL1, CD100 (SEMA4D), CD69, SLAMF6 (NTB-A, Ly108), SLAM (SLAMF1, CD150, IPO-3), BLAME (SLAMF8), SELPLG (CD162), LTBR, LAT, GADS, SLP-76, PAG/Cbp, CD19a, CD28-OX40, CD28-4-1BB, or a ligand that specifically binds with CD83. In some embodiments, the costimulatory signaling domain comprises a functional signaling domain derived from 4-1BB. In some embodiments, the costimulatory signaling domain comprises the amino acid sequence of SEQ ID NO: 7, or an amino acid sequence having at least about 85%, 90%, 95%, or 99% sequence identity thereof. In some embodiments, the nucleic acid molecule comprises a nucleic acid sequence encoding the costimulatory signaling domain, wherein the nucleic acid sequence comprises the nucleic acid sequence of SEQ ID NO: 18, or a nucleic acid sequence having at least about 85%, 90%, 95%, or 99% sequence identity thereof.

[0075] In some embodiments, the intracellular signaling domain comprises a functional signaling domain derived from 4-1BB and a functional signaling domain derived from CD3 zeta. In some embodiments, the intracellular signaling domain comprises the amino acid sequence of SEQ ID NO: 7 (or an amino acid sequence having at least about 85%, 90%, 95%, or 99% sequence identity thereof) and the amino acid sequence of SEQ ID NO: 9 or 10 (or an amino acid sequence having at least about 85%, 90%, 95%, or 99% sequence identity thereof). In some embodiments, the intracellular signaling domain comprises the amino acid sequence of SEQ ID NO: 7 and the amino acid sequence of SEQ ID NO: 9 or 10.

[0076] In some embodiments, the CAR further comprises a leader sequence comprising the amino acid sequence of SEQ ID NO: 1.

[0077] In some embodiments, this invention features a population of CAR-expressing cells (for example, autologous or allogeneic CAR-expressing T cells or NK cells) made by any of the aforementioned methods or any other method disclosed herein. In some embodiments, disclosed herein is a pharmaceutical composition comprising a population of CAR-expressing cells disclosed herein and a pharmaceutically acceptable carrier.

[0078] In some embodiments, in the final CAR cell product manufactured using the methods described herein, the total amount of beads (e.g., CD4 beads, CD8 beads, and/or TransACT beads) is no more than 0.04, 0.05, 0.06, 0.07, 0.08, 0.09, 0.1, 0.2, 0.3, 0.4, or 0.5% of the total amount of beads added during the manufacturing process.

[0079] In some embodiments, this invention features a population of CAR-expressing cells (for example, autologous or allogeneic CAR-expressing T cells or NK cells) comprising one or more of the following characteristics: (a) about the same percentage of naive cells, for example, naive T cells, for example, CD45RO- CCR7+ T cells, as compared to the percentage of naive cells, for example, naive T cells, for example, CD45RO- CCR7+ cells, in the same population of cells prior to being engineered to express the CAR; (b) a change within about 5% to about 10% of naive cells, for example, naive T cells, for example, CD45RO- CCR7+ T cells, for example, as compared to the percentage of naive cells, for example, naive T cells, for example, CD45RO- CCR7+ cells, in the same population of cells prior to being engineered to express the CAR; (c) an increased percentage of naive cells, for example, naive T cells, for example, CD45RO- CCR7+ T cells, for example, increased by at least 1.2, 1.4, 1.6, 1.8, 2.0, 2.2, 2.4, 2.6, 2.8, or 3-fold, as compared to the percentage of naive cells, for example, naive T cells, for example, CD45RO- CCR7+ cells, in the same population of cells prior to being engineered to express the CAR; (d) about the same percentage of central memory cells, for example, central memory T cells, for example, CCR7+CD45RO+ T cells, as compared to the percentage of central memory cells, for example, central memory T cells, for example, CCR7+CD45RO+ T cells, in the same population of cells prior to being engineered to express the CAR; (e) a change within about 5% to about 10% of central memory cells, for example, central memory T cells, for example, CCR7+CD45RO+ T cells, as compared to the percentage of central memory cells, for example, central memory T cells, for example, CCR7+CD45RO+ T cells, in the same population of cells prior to being engineered to express the CAR; (f) a decreased percentage of central memory cells, for example, central memory T cells, for example, CCR7+CD45RO+ T cells, for example, decreased by at least 20, 25, 30, 35, 40, 45, or 50%, as compared to the percentage of central memory cells, for example, central memory T cells, for example, CCR7+CD45RO+ T cells, in the same population of cells prior to being engineered to express the CAR; (g) about the same percentage of stem memory T cells, for example, CD45RA+CD95+IL-2 receptor β+CCR7+CD62L+ T cells, as compared to the percentage of stem memory T cells, for example, CD45RA+CD95+IL-2 receptor β+CCR7+CD62L+ T cells, in the same population of cells prior to being engineered to express the CAR; (h) a change within about 5% to about 10% of stem memory T cells, for example, CD45RA+CD95+IL-2 receptor β+CCR7+CD62L+ T cells, as compared to the percentage of stem memory T cells, for example, CD45RA+CD95+IL-2 receptor β+CCR7+CD62L+ T cells, in the same population of cells prior to being engineered to express the CAR; or (i) an increased percentage of stem memory T cells, for example, CD45RA+CD95+IL-2 receptor β+CCR7+CD62L+ T cells, as compared to the percentage of stem memory T cells, for example, CD45RA+CD95+IL-2 receptor β+CCR7+CD62L+ T cells, in the same population of cells prior to being engineered to express the CAR.

[0080] In some embodiments, this invention features a population of CAR-expressing cells (for example, autologous or allogeneic CAR-expressing T cells or NK cells), wherein: (a) the median GeneSetScore (Up TEM vs. Down TSCM) of the population of cells is about the same as or differs by no more than (for example, increased by no more than) about 25, 50, 75, 100, or 125% from the median GeneSetScore (Up TEM vs. Down TSCM) of the same population of cells prior to being engineered to express the CAR; (b) the median GeneSetScore (Up Treg vs. Down Teff) of the population of cells is about the same as or differs by no more than (for example, increased by no more than) about 25, 50, 100, 150, or 200% from the median GeneSetScore (Up Treg vs. Down Teff) of the population of cells prior to being engineered to express the CAR; (c) the median GeneSetScore (Down stemness) of the population of cells is about the same as or differs by no more than (for example, increased by no more than) about 25, 50, 100, 150, 200, or 250% from the median GeneSetScore (Down stemness) of the population of cells prior to being engineered to express the CAR; (d) the median GeneSetScore (Up hypoxia) of the population of cells is about the same as or differs by no more than (for example, increased by no more than) about 125, 150, 175, or 200% from the median GeneSetScore (Up hypoxia) of the population of cells prior to being engineered to express the CAR; or (e) the median GeneSetScore (Up autophagy) of the population of cells is about the same as or differs by no more than (for example, increased by no more than) about 180, 190, 200, or 210% from the median GeneSetScore (Up autophagy) of the population of cells prior to being engineered to express the CAR.

[0081] In some embodiments, this invention features a method of increasing an immune response in a subject, comprising administering a population of CAR-expressing cells disclosed herein or a pharmaceutical composition disclosed herein to the subject, thereby increasing an immune response in the subject.

[0082] In some embodiments, disclosed herein is a method of treating a cancer in a subject, comprising administering a population of CAR-expressing cells disclosed herein or a pharmaceutical composition disclosed herein to the subject, thereby treating the cancer in the subject. In some embodiments, the cancer is a solid cancer, for example, chosen from: one or more of mesothelioma, malignant pleural mesothelioma, non-small cell lung cancer, small cell lung cancer, squamous cell lung cancer, large cell lung cancer, pancreatic cancer, pancreatic ductal adenocarcinoma, esophageal adenocarcinoma, breast cancer, glioblastoma, ovarian cancer, colorectal cancer, prostate cancer, cervical cancer, skin cancer, melanoma, renal cancer, liver cancer, brain cancer, thymoma, sarcoma, carcinoma, uterine cancer, kidney cancer, gastrointestinal cancer, urothelial cancer, pharynx cancer, head and neck cancer, rectal cancer, esophagus cancer, or bladder cancer, or a metastasis thereof. In some embodiments, the cancer is a liquid cancer, for example, chosen from: chronic lymphocytic leukemia (CLL), mantle cell lymphoma (MCL), multiple myeloma, acute lymphoid leukemia (ALL), Hodgkin lymphoma, B-cell acute lymphoid leukemia (BALL), T-cell acute lymphoid leukemia (TALL), small lymphocytic leukemia (SLL), B cell prolymphocytic leukemia, blastic plasmacytoid dendritic cell neoplasm, Burkitt’s lymphoma, diffuse large B cell lymphoma (DLBCL), DLBCL associated with chronic inflammation, chronic myeloid leukemia, myeloproliferative neoplasms, follicular lymphoma, pediatric follicular lymphoma, hairy cell leukemia, small cell-or a large cell-follicular lymphoma, malignant lymphoproliferative conditions, MALT lymphoma (extranodal marginal zone lymphoma of mucosa-associated lymphoid tissue), Marginal zone lymphoma, myelodysplasia, myelodysplastic syndrome, non-Hodgkin lymphoma, plasmablastic lymphoma, plasmacytoid dendritic cell neoplasm, Waldenstrom macroglobulinemia, splenic marginal zone lymphoma, splenic lymphoma/leukemia, splenic diffuse red pulp small B-cell lymphoma, hairy cell leukemia-variant, lymphoplasmacytic lymphoma, a heavy chain disease, plasma cell myeloma, solitary plasmocytoma of bone, extraosseous plasmocytoma, nodal marginal zone lymphoma, pediatric nodal marginal zone lymphoma, primary cutaneous follicle center lymphoma, lymphomatoid granulomatosis, primary mediastinal (thymic) large B-cell lymphoma, intravascular large B-cell lymphoma, ALK+ large B-cell lymphoma, large B-cell lymphoma arising in HHV8-associated multicentric Castleman disease, primary effusion lymphoma, B-cell lymphoma, acute myeloid leukemia (AML), or unclassifiable lymphoma.

[0083] In some embodiments, the method further comprises administering a second therapeutic agent to the subject. In some embodiments, the second therapeutic agent is an anti-cancer therapeutic agent, for example, a chemotherapy, a radiation therapy, or an immune-regulatory therapy. In some embodiments, the second therapeutic agent is IL-15 (for example, hetIL-15 (IL15/sIL-15Ra)).

[0084] In some aspects, the disclosure features an antibody molecule that binds CD28, comprising a heavy chain variable region (VH) comprising a heavy chain complementarity determining region 1 (HCDR1), a HCDR2, and a HCDR3, and a light chain variable region (VL) comprising a light chain complementarity determining region 1 (LCDR1), a LCDR2, and a LCDR3, wherein (i) the HCDR1, HCDR2, HCDR3, LCDR1, LCDR2, and LCDR3 comprise the amino acid sequences of SEQ ID NO: 538, 539, 540, 530, 531, and 532, respectively; (ii) the HCDR1, HCDR2, HCDR3, LCDR1, LCDR2, and LCDR3 comprise the amino acid sequences of SEQ ID NO: 541, 539, 540, 530, 531, and 532, respectively; (iii) the HCDR1, HCDR2, HCDR3, LCDR1, LCDR2, and LCDR3 comprise the amino acid sequences of SEQ ID NO: 542, 543, 540, 533, 534, and 535, respectively; or (iv) the HCDR1, HCDR2, HCDR3, LCDR1, LCDR2, and LCDR3 comprise the amino acid sequences of SEQ ID NO: 544, 545, 546, 536, 534, and 532, respectively.

[0085] In some embodiments, the anti- CD28 antibody molecule described herein comprises: (i) a VH comprising the amino acid sequence of SEQ ID NO: 547 or 548, or a sequence with at least 95% sequence identity to SEQ ID NO: 547 or 548; and/or (ii) a VL comprising the amino acid sequence of SEQ ID NO: 537, or a sequence with at least 95% sequence identity thereto. In some embodiments, the anti- CD28 antibody molecule comprises: (i) a VH comprising the amino acid sequence of SEQ ID NO: 547 or a sequence with at least 95% sequence identity thereto, and a VL comprising the amino acid sequence of SEQ ID NO: 537, or a sequence with at least 95% sequence identity thereto; or (ii) a VH comprising the amino acid sequence of SEQ ID NO: 548 or a sequence with at least 95% sequence identity thereto, and a VL comprising the amino acid sequence of SEQ ID NO: 537, or a sequence with at least 95% sequence identity thereto. In some embodiments, the anti- CD28 antibody molecule is a human antibody, a full length antibody, a bispecific antibody, Fab, F(ab′)2, Fv, or a single chain Fv fragment (scFv). In some embodiments, the antibody molecule comprises a heavy chain constant region selected from IgG1, IgG2, IgG3, and IgG4, and a light chain constant region chosen from the light chain constant regions of kappa or lambda.

[0086] In some aspects, the disclosure features an antibody molecule that (i) competes for binding to CD28 with an anti-CD28 antibody molecule described herein; and/or (ii) binds to the same epitope as, substantially the same epitope as, an epitope that overlaps with, or an epitope that substantially overlaps with, the epitope of an anti-CD28 antibody molecule described herein.

[0087] In some aspects, the disclosure features a multispecific binding molecule comprising: (i) an anti-CD3 binding domain, and (ii) a CD28 antigen binding domain comprising an anti-CD28 antibody molecule described herein. In some embodiments, the anti-CD3 binding domain comprises: (i) a HCDR1, HCDR2, HCDR3, LCDR1, LCDR2, and LCDR3 of an anti-CD3 antibody molecule of Table 27 (for example the anti-CD3 (1), anti-CD3 (2), anti-CD3 (3), or anti-CD3 (4)); (ii) the amino acid sequence of any one of the VH and/or VL region of an anti-CD3 antibody molecule provided in Table 27 (for example the anti-CD3 (1), anti-CD3 (2), anti-CD3 (3), or anti-CD3 (4)), or an amino acid sequence at least 95% identical thereto.

[0088] In some aspects, the disclosure features a multispecific binding molecule, comprising a first binding domain and a second binding domain: (i) a first polypeptide comprising from N-terminal to C-terminal: VH of the first binding domain, VL of the first binding domain, VH of the second binding domain, CH1, CH2, and CH3; and (ii) a second polypeptide comprising from N-terminal to C-terminal: VL of the second binding domain and CL. In some embodiments, the first binding domain comprises an anti-CD3 binding domain and the second binding domain comprises a costimulatory molecule binding domain. In some embodiments, the first binding domain comprises a costimulatory molecule binding domain and the second binding domain comprises an anti-CD3 binding domain. In some embodiments, the costimulatory molecule binding domain comprises an anti-CD2 binding domain or an anti-CD28 binding domain.

[0089] In some aspects, the disclosure features a multispecific binding molecule comprising a first binding domain and a second binding domain: (i) a first polypeptide comprising from N-terminal to C-terminal: VH of the second binding domain, CH1, CH2, CH3, VH of the first binding domain, and VL of the first binding domain; and (ii) a second polypeptide comprising from N-terminal to C-terminal: VL of the second binding domain and CL.

[0090] In some embodiments, the first binding domain comprises an anti-CD3 binding domain and the second binding domain comprises a costimulatory molecule binding domain. In some embodiments, the first binding domain comprises a costimulatory molecule binding domain and the second binding domain comprises an anti-CD3 binding domain. In some embodiments, the costimulatory molecule binding domain comprises an anti-CD2 binding domain or an anti-CD28 binding domain.

[0091] In some aspects, the disclosure features a multispecific binding molecule comprising a first binding domain and a second binding domain: (i) a first polypeptide comprising from N-terminal to C-terminal: VH of the second binding domain, CH1, VH of the first binding domain, VL of the first binding domain, CH2, and CH3; and (ii) a second polypeptide comprising from N-terminal to C-terminal: VL of the second binding domain and CL. In some embodiments, the first binding domain comprises an anti-CD3 binding domain and the second binding domain comprises a costimulatory molecule binding domain. In some embodiments, the first binding domain comprises a costimulatory molecule binding domain and the second binding domain comprises an anti-CD3 binding domain. In some embodiments, the costimulatory molecule binding domain comprises an anti-CD2 binding domain or an anti-CD28 binding domain.

[0092] In some aspects, the disclosure features a method of activating cells (e.g., immune effector cells, e.g., T cells), comprising contacting (for example, binding) a population of cells (for example, T cells, for example, T cells isolated from a frozen or fresh leukapheresis product) with a multispecific binding molecule described herein.

[0093] In some aspects, the disclosure features a method of transducing cells (e.g., immune effector cells, e.g., T cells), comprising contacting (for example, binding) a population of cells (for example, T cells, for example, T cells isolated from a frozen or fresh leukapheresis product) with (i) a multispecific binding molecule described herein and (ii) a nucleic acid molecule, e.g., a nucleic acid molecule encoding a CAR.

[0094] Those skilled in the art will recognize or be able to ascertain using no more than routine experimentation, many equivalents to the specific embodiments of the invention described herein. Such equivalents are intended to be encompassed by the following enumerated embodiments.

### Enumerated Embodiments

[0095] 1. A method of making a population of cells (for example, T cells) that express a chimeric antigen receptor (CAR), the method comprising:
   [0096] (i) contacting (for example, binding) a population of cells (for example, T cells, for example, T cells isolated from a frozen or fresh leukapheresis product) with (A) an agent that stimulates a CD3/TCR complex and/or (B) an agent that stimulates a costimulatory molecule and/or growth factor receptor on the surface of the cells;
   [0097] (ii) contacting the population of cells (for example, T cells) with a nucleic acid molecule (for example, a DNA or RNA molecule) encoding the CAR, thereby providing a population of cells (for example, T cells) comprising the nucleic acid molecule, and
   [0098] (iii) harvesting the population of cells (for example, T cells) for storage (for example, reformulating the population of cells in cryopreservation media) or administration, wherein:
      [0099] (a) step (ii) is performed together with step (i) or no later than 20 hours after the beginning of step (i), for example, no later than 12, 13, 14, 15, 16, 17, or 18 hours after the beginning of step (i), for example, no later than 18 hours after the beginning of step (i), and step (iii) is performed no later than 30 (for example, 26) hours after the beginning of step (i), for example, no later than 22, 23, 24, 25, 26, 27, 28, 29, or 30 hours after the beginning of step (i), for example, no later than 24 hours after the beginning of step (i),
      [0100] (b) step (ii) is performed together with step (i) or no later than 20 hours after the beginning of step (i), for example, no later than 12, 13, 14, 15, 16, 17, or 18 hours after the beginning of step (i), for example, no later than 18 hours after the beginning of step (i), and step (iii) is performed no later than 30 hours after the beginning of step (ii), for example, no later than 22, 23, 24, 25, 26, 27, 28, 29, or 30 hours after the beginning of step (ii), or
      [0101] (c) the population of cells from step (iii) are not expanded, or expanded by no more than 5, 10, 15, 20, 25, 30, 35, or 40%, for example, no more than 10%, for example, as assessed by the number of living cells, compared to the population of cells at the beginning of step (i),
      [0102] optionally wherein the nucleic acid molecule in step (ii) is on a viral vector, optionally wherein the nucleic acid molecule in step (ii) is an RNA molecule on a viral vector, optionally wherein step (ii) comprises transducing the population of cells (for example, T cells) with a viral vector comprising a nucleic acid molecule encoding the CAR, optionally wherein step (ii) further comprises adding F108 as an adjuvant during transduction and/or contacting the population of cells (for example, T cells) with an shRNA that targets Tet2.
[0103] 2. The method of embodiment 1, wherein the agent that stimulates a CD3/TCR complex is an agent that stimulates CD3 (for example, an anti-CD3 or anti-TCR antibody fragment comprising the respective CDRs provided in Table 27) and wherein the agent that stimulates a costimulatory molecule and/or growth factor receptor is an agent that stimulates CD28 or CD2 (for example, an anti-CD28 or anti-CD2 antibody fragment comprising the respective CDRs provided in Table 27), or any combination thereof, optionally wherein the agent that stimulates a CD3/TCR complex is an agent that stimulates CD3 and the agent that stimulates a costimulatory molecule and/or growth factor receptor are comprised in a multispecific binding molecule, optionally a bispecific antibody configured in any one of the schema provided in FIG. 50A.
[0104] 3. The method of embodiment 1 or 2, wherein step (i) increases the percentage of CAR-expressing cells in the population of cells from step (iii), for example, the population of cells from step (iii) shows a higher percentage of CAR-expressing cells (for example, at least 10, 20, 30, 40, 50, or 60% higher), compared with cells made by an otherwise similar method without step (i).
[0105] 4. The method of any one of embodiments 1-3, wherein:
   [0106] (a) the percentage of naive cells, for example, naive T cells, for example, CD45RA+ CD45RO- CCR7+ T cells, in the population of cells from step (iii) is the same as or differs by no more than 5 or 10% from the percentage of naive cells, for example, naive T cells, for example, CD45RA+ CD45RO- CCR7+ cells, in the population of cells at the beginning of step (i);
   [0107] (b) the percentage of naive cells, for example, naive T cells, for example, CD45RA+ CD45RO- CCR7+ T cells, in the population of cells from step (iii) is increased by, for example, at least 1.2, 1.4, 1.6, 1.8, 2.0, 2.2, 2.4, 2.6, 2.8, or 3-fold, as compared to the percentage of naive cells, for example, naive T cells, for example, CD45RA+ CD45RO- CCR7+ cells, in the population of cells at the beginning of step (i);
   [0108] (c) the percentage of CAR-expressing naive T cells, for example, CAR-expressing CD45RA+ CD45RO- CCR7+ T cells in the population of cells increases during the duration of step (ii), for example, increases by, for example, at least 30, 35, 40, 45, 50, 55, or 60%, between 18-24 hours after the beginning of step (ii); or
   [0109] (d) the percentage of naive cells, for example, naive T cells, for example, CD45RA+ CD45RO- CCR7+ T cells, in the population of cells from step (iii) does not decrease, or decreases by no more than 5 or 10%, as compared to the percentage of naive cells, for example, naive T cells, for example, CD45RA+ CD45RO- CCR7+ cells, in the population of cells at the beginning of step (i).
[0110] 5. The method of any one of embodiments 1-4, wherein:
   [0111] (a) the population of cells from step (iii) shows a higher percentage of naive cells, for example, naive T cells, for example, CD45RA+ CD45RO- CCR7+ T cells (for example, at least 10, 20, 30, or 40% higher), compared with cells made by an otherwise similar method in which step (iii) is performed more than 26 hours after the beginning of step (i), for example, more than 5, 6, 7, 8, 9, 10, 11, or 12 days after the beginning of step (i);
   [0112] (b) the percentage of naive cells, for example, naive T cells, for example, CD45RA+ CD45RO- CCR7+ T cells, in the population of cells from step (iii) is higher (for example, at least 1.2, 1.4, 1.6, 1.8, 2.0, 2.2, 2.4, 2.6, 2.8, or 3-fold higher) than the percentage of naive cells, for example, naive T cells, for example, CD45RA+ CD45RO- CCR7+ T cells, in cells made by an otherwise similar method in which step (iii) is performed more than 26 hours after the beginning of step (i), for example, more than 5, 6, 7, 8, 9, 10, 11, or 12 days after the beginning of step (i);
   [0113] (c) the percentage of CAR-expressing naive T cells, for example, CAR-expressing CD45RA+ CD45RO- CCR7+ T cells, in the population of cells from step (iii) is higher (for example, at least 4, 6, 8, 10, or 12-fold higher) than the percentage of CAR-expressing naive T cells, for example, CAR-expressing CD45RA+ CD45RO- CCR7+ T cells, in cells made by an otherwise similar method in which step (iii) is performed more than 26 hours after the beginning of step (i), for example, more than 5, 6, 7, 8, 9, 10, 11, or 12 days after the beginning of step (i);
   [0114] (d) the population of cells from step (iii) shows a higher percentage of naive cells, for example, naive T cells, for example, CD45RA+ CD45RO- CCR7+ T cells (for example, at least 10, 20, 30, or 40% higher), compared with cells made by an otherwise similar method which further comprises, after step (ii) and prior to step (iii), expanding the population of cells (for example, T cells) in vitro for more than 3 days, for example, for 5, 6, 7, 8 or 9 days;
   [0115] (e) the percentage of naive cells, for example, naive T cells, for example, CD45RA+ CD45RO- CCR7+ T cells, in the population of cells from step (iii) is higher (for example, at least 1.2, 1.4, 1.6, 1.8, 2.0, 2.2, 2.4, 2.6, 2.8, or 3-fold higher) than the percentage of naive cells, for example, naive T cells, for example, CD45RA+ CD45RO- CCR7+ T cells, in cells made by an otherwise similar method which further comprises, after step (ii) and prior to step (iii), expanding the population of cells (for example, T cells) in vitro for more than 3 days, for example, for 5, 6, 7, 8 or 9 days; or
   [0116] (f) the percentage of CAR-expressing naive T cells, for example, CAR-expressing CD45RA+ CD45RO- CCR7+ T cells, in the population of cells from step (iii) is higher (for example, at least 4, 6, 8, 10, or 12-fold higher) than the percentage of CAR-expressing naive T cells, for example, CAR-expressing CD45RA+ CD45RO- CCR7+ T cells, in cells made by an otherwise similar method which further comprises, after step (ii) and prior to step (iii), expanding the population of cells (for example, T cells) in vitro for more than 3 days, for example, for 5, 6, 7, 8 or 9 days.
[0117] 6. The method of any one of embodiments 1-5, wherein:
   [0118] (a) the percentage of central memory cells, for example, central memory T cells, for example, CD95+ central memory T cells, in the population of cells from step (iii) is the same as or differs by no more than 5 or 10% from the percentage of central memory cells, for example, central memory T cells, for example, CD95+ central memory T cells, in the population of cells at the beginning of step (i);
   [0119] (b) the percentage of central memory cells, for example, central memory T cells, for example, CCR7+CD45RO+ T cells, in the population of cells from step (iii) is reduced by at least 20, 25, 30, 35, 40, 45, or 50%, as compared to the percentage of central memory cells, for example, central memory T cells, for example, CCR7+CD45RO+ T cells, in the population of cells at the beginning of step (i);
   [0120] (c) the percentage of CAR-expressing central memory T cells, for example, CAR-expressing CCR7+CD45RO+ cells, decreases during the duration of step (ii), for example, decreases by, for example, at least 8, 10, 12, 14, 16, 18, or 20%, between 18-24 hours after the beginning of step (ii); or
   [0121] (d) the percentage of central memory cells, for example, central memory T cells, for example, CCR7+CD45RO+ T cells, in the population of cells from step (iii) does not increase, or increases by no more than 5 or 10%, as compared to the percentage of central memory cells, for example, central memory T cells, for example, CCR7+CD45RO+ T cells, in the population of cells at the beginning of step (i).
[0122] 7. The method of any one of embodiments 1-6, wherein:
   [0123] (a) the population of cells from step (iii) shows a lower percentage of central memory cells, for example, central memory T cells, for example, CD95+ central memory T cells (for example, at least 10, 20, 30, or 40% lower), compared with cells made by an otherwise similar method in which step (iii) is performed more than 26 hours after the beginning of step (i), for example, more than 5, 6, 7, 8, 9, 10, 11, or 12 days after the beginning of step (i);
   [0124] (b) the percentage of central memory cells, for example, central memory T cells, for example, CCR7+CD45RO+ T cells in the population of cells from step (iii) is lower (for example, at least 20, 30, 40, or 50% lower) than the percentage of central memory cells, for example, central memory T cells, for example, CCR7+CD45RO+ T cells, in cells made by an otherwise similar method in which step (iii) is performed more than 26 hours after the beginning of step (i), for example, more than 5, 6, 7, 8, 9, 10, 11, or 12 days after the beginning of step (i);
   [0125] (c) the percentage of CAR-expressing central memory T cells, for example, CAR-expressing CCR7+CD45RO+ T cells in the population of cells from step (iii) is lower (for example, at least 10, 20, 30, or 40% lower) than the percentage of CAR-expressing central memory T cells, for example, CAR-expressing CCR7+CD45RO+ T cells, in cells made by an otherwise similar method in which step (iii) is performed more than 26 hours after the beginning of step (i), for example, more than 5, 6, 7, 8, 9, 10, 11, or 12 days after the beginning of step (i);
   [0126] (d) the population of cells from step (iii) shows a lower percentage of central memory cells, for example, central memory T cells, for example, CD95+ central memory T cells (for example, at least 10, 20, 30, or 40% lower), compared with cells made by an otherwise similar method which further comprises, after step (ii) and prior to step (iii), expanding the population of cells (for example, T cells) in vitro for more than 3 days, for example, for 5, 6, 7, 8 or 9 days;
   [0127] (e) the percentage of central memory cells, for example, central memory T cells, for example, CCR7+CD45RO+ T cells in the population of cells from step (iii) is lower (for example, at least 20, 30, 40, or 50% lower) than the percentage of central memory cells, for example, central memory T cells, for example, CCR7+CD45RO+ T cells, in cells made by an otherwise similar method which further comprises, after step (ii) and prior to step (iii), expanding the population of cells (for example, T cells) in vitro for more than 3 days, for example, for 5, 6, 7, 8 or 9 days; or
   [0128] (f) the percentage of CAR-expressing central memory T cells, for example, CAR-expressing CCR7+CD45RO+ T cells in the population of cells from step (iii) is lower (for example, at least 10, 20, 30, or 40% lower) than the percentage of CAR-expressing central memory T cells, for example, CAR-expressing CCR7+CD45RO+ T cells, in cells made by an otherwise similar method which further comprises, after step (ii) and prior to step (iii), expanding the population of cells (for example, T cells) in vitro for more than 3 days, for example, for 5, 6, 7, 8 or 9 days.
[0129] 8. The method of any one of embodiments 1-7, wherein:
   [0130] (a) the percentage of stem memory T cells, for example, CD45RA+CD95+IL-2 receptor β+CCR7+CD62L+ T cells, in the population of cells from step (iii) is increased, as compared to the percentage of stem memory T cells, for example, CD45RA+CD95+IL-2 receptor β+CCR7+CD62L+ T cells, in the population of cells at the beginning of step (i);
   [0131] (b) the percentage of CAR-expressing stem memory T cells, for example, CAR-expressing CD45RA+CD95+IL-2 receptor β+CCR7+CD62L+ T cells, in the population of cells from step (iii) is increased, as compared to the percentage of CAR-expressing stem memory T cells, for example, CAR-expressing CD45RA+CD95+IL-2 receptor β+CCR7+CD62L+ T cells, in the population of cells at the beginning of step (i);
   [0132] (c) the percentage of stem memory T cells, for example, CD45RA+CD95+IL-2 receptor β+CCR7+CD62L+ T cells, in the population of cells from step (iii) is higher than the percentage of stem memory T cells, for example, CD45RA+CD95+IL-2 receptor β+CCR7+CD62L+ T cells, in cells made by an otherwise similar method in which step (iii) is performed more than 26 hours after the beginning of step (i), for example, more than 5, 6, 7, 8, 9, 10, 11, or 12 days after the beginning of step (i); or
   [0133] (d) the percentage of CAR-expressing stem memory T cells, for example, CAR-expressing CD45RA+CD95+IL-2 receptor β+CCR7+CD62L+ T cells, in the population of cells from step (iii) is higher than the percentage of CAR-expressing stem memory T cells, for example, CAR-expressing CD45RA+CD95+IL-2 receptor β+CCR7+CD62L+ T cells, in cells made by an otherwise similar method in which step (iii) is performed more than 26 hours after the beginning of step (i), for example, more than 5, 6, 7, 8, 9, 10, 11, or 12 days after the beginning of step (i);
   [0134] (e) the percentage of stem memory T cells, for example, CD45RA+CD95+IL-2 receptor β+CCR7+CD62L+ T cells, in the population of cells from step (iii) is higher than the percentage of stem memory T cells, for example, CD45RA+CD95+IL-2 receptor β+CCR7+CD62L+ T cells, in cells made by an otherwise similar method which further comprises, after step (ii) and prior to step (iii), expanding the population of cells (for example, T cells) in vitro for more than 3 days, for example, for 5, 6, 7, 8 or 9 days; or
   [0135] (f) the percentage of CAR-expressing stem memory T cells, for example, CAR-expressing CD45RA+CD95+IL-2 receptor β+CCR7+CD62L+ T cells, in the population of cells from step (iii) is higher than the percentage of CAR-expressing stem memory T cells, for example, CAR-expressing CD45RA+CD95+IL-2 receptor β+CCR7+CD62L+ T cells, in cells made by an otherwise similar method which further comprises, after step (ii) and prior to step (iii), expanding the population of cells (for example, T cells) in vitro for more than 3 days, for example, for 5, 6, 7, 8 or 9 days.
[0136] 9. The method of any one of embodiments 1-8, wherein:
   [0137] (a) the median GeneSetScore (Up TEM vs. Down TSCM) of the population of cells from step (iii) is about the same as or differs by no more than (for example, increased by no more than) about 25, 50, 75, 100, or 125% from the median GeneSetScore (Up TEM vs. Down TSCM) of the population of cells at the beginning of step (i);
   [0138] (b) the median GeneSetScore (Up TEM vs. Down TSCM) of the population of cells from step (iii) is lower (for example, at least about 100, 150, 200, 250, or 300% lower) than the median GeneSetScore (Up TEM vs. Down TSCM) of:
      [0139] cells made by an otherwise similar method in which step (iii) is performed more than 26 hours after the beginning of step (i), for example, more than 5, 6, 7, 8, 9, 10, 11, or 12 days after the beginning of step (i), or
      [0140] cells made by an otherwise similar method which further comprises, after step (ii) and prior to step (iii), expanding the population of cells (for example, T cells) in vitro for more than 3 days, for example, for 5, 6, 7, 8 or 9 days;
   [0141] (c) the median GeneSetScore (Up Treg vs. Down Teff) of the population of cells from step (iii) is about the same as or differs by no more than (for example, increased by no more than) about 25, 50, 100, 150, or 200% from the median GeneSetScore (Up Treg vs. Down Teff) of the population of cells at the beginning of step (i);
   [0142] (d) the median GeneSetScore (Up Treg vs. Down Teff) of the population of cells from step (iii) is lower (for example, at least about 50, 100, 125, 150, or 175% lower) than the median GeneSetScore (Up Treg vs. Down Teff) of:
      [0143] cells made by an otherwise similar method in which step (iii) is performed more than 26 hours after the beginning of step (i), for example, more than 5, 6, 7, 8, 9, 10, 11, or 12 days after the beginning of step (i), or
      [0144] cells made by an otherwise similar method which further comprises, after step (ii) and prior to step (iii), expanding the population of cells (for example, T cells) in vitro for more than 3 days, for example, for 5, 6, 7, 8 or 9 days;
   [0145] (e) the median GeneSetScore (Down stemness) of the population of cells from step (iii) is about the same as or differs by no more than (for example, increased by no more than) about 25, 50, 100, 150, 200, or 250% from the median GeneSetScore (Down stemness) of the population of cells at the beginning of step (i);
   [0146] (f) the median GeneSetScore (Down stemness) of the population of cells from step (iii) is lower (for example, at least about 50, 100, or 125% lower) than the median GeneSetScore (Down stemness) of:
      [0147] cells made by an otherwise similar method in which step (iii) is performed more than 26 hours after the beginning of step (i), for example, more than 5, 6, 7, 8, 9, 10, 11, or 12 days after the beginning of step (i), or
      [0148] cells made by an otherwise similar method which further comprises, after step (ii) and prior to step (iii), expanding the population of cells (for example, T cells) in vitro for more than 3 days, for example, for 5, 6, 7, 8 or 9 days;
   [0149] (g) the median GeneSetScore (Up hypoxia) of the population of cells from step (iii) is about the same as or differs by no more than (for example, increased by no more than) about 125, 150, 175, or 200% from the median GeneSetScore (Up hypoxia) of the population of cells at the beginning of step (i);
   [0150] (h) the median GeneSetScore (Up hypoxia) of the population of cells from step (iii) is lower (for example, at least about 40, 50, 60, 70, or 80% lower) than the median GeneSetScore (Up hypoxia) of:
      [0151] cells made by an otherwise similar method in which step (iii) is performed more than 26 hours after the beginning of step (i), for example, more than 5, 6, 7, 8, 9, 10, 11, or 12 days after the beginning of step (i), or
      [0152] cells made by an otherwise similar method which further comprises, after step (ii) and prior to step (iii), expanding the population of cells (for example, T cells) in vitro for more than 3 days, for example, for 5, 6, 7, 8 or 9 days;
   [0153] (j) the median GeneSetScore (Up autophagy) of the population of cells from step (iii) is about the same as or differs by no more than (for example, increased by no more than) about 180, 190, 200, or 210% from the median GeneSetScore (Up autophagy) of the population of cells at the beginning of step (i); or
   [0154] (k) the median GeneSetScore (Up autophagy) of the population of cells from step (iii) is lower (for example, at least 20, 30, or 40% lower) than the median GeneSetScore (Up autophagy) of:
      [0155] cells made by an otherwise similar method in which step (iii) is performed more than 26 hours after the beginning of step (i), for example, more than 5, 6, 7, 8, 9, 10, 11, or 12 days after the beginning of step (i), or
      [0156] cells made by an otherwise similar method which further comprises, after step (ii) and prior to step (iii), expanding the population of cells (for example, T cells) in vitro for more than 3 days, for example, for 5, 6, 7, 8 or 9 days.
[0157] 10. The method of any one of embodiments 1-9, wherein the population of cells from step (iii), after being incubated with a cell expressing an antigen recognized by the CAR, secretes IL-2 at a higher level (for example, at least 2, 4, 6, 8, 10, 12, or 14-fold higher) than cells made by an otherwise similar method in which step (iii) is performed more than 26 hours after the beginning of step (i), for example, more than 5, 6, 7, 8, 9, 10, 11, or 12 days after the beginning of step (i), or cells made by an otherwise similar method which further comprises, after step (ii) and prior to step (iii), expanding the population of cells (for example, T cells) in vitro for more than 3 days, for example, for 5, 6, 7, 8 or 9 days, for example, as assessed using methods described in Example 8 with respect to FIGS. 29C-29D.
[0158] 11. The method of any one of embodiments 1-10, wherein the population of cells from step (iii), after being administered in vivo, persists longer or expands at a higher level (for example, as assessed using methods described in Example 1 with respect to FIG. 4C), compared with cells made by an otherwise similar method in which step (iii) is performed more than 26 hours after the beginning of step (i), for example, more than 5, 6, 7, 8, 9, 10, 11, or 12 days after the beginning of step (i), or compared with cells made by an otherwise similar method which further comprises, after step (ii) and prior to step (iii), expanding the population of cells (for example, T cells) in vitro for more than 3 days, for example, for 5, 6, 7, 8 or 9 days.
[0159] 12. The method of any one of embodiments 1-11, wherein the population of cells from step (iii), after being administered in vivo, shows a stronger anti-tumor activity (for example, a stronger anti-tumor activity at a low dose, for example, a dose no more than 0.15 × 10⁶, 0.2 × 10⁶, 0.25 × 10⁶, or 0.3 × 10⁶ viable CAR-expressing cells) than cells made by an otherwise similar method in which step (iii) is performed more than 26 hours after the beginning of step (i), for example, more than 5, 6, 7, 8, 9, 10, 11, or 12 days after the beginning of step (i), or cells made by an otherwise similar method which further comprises, after step (ii) and prior to step (iii), expanding the population of cells (for example, T cells) in vitro for more than 3 days, for example, for 5, 6, 7, 8 or 9 days.
[0160] 13. The method of any one of embodiments 1-12, the population of cells from step (iii) are not expanded, or expanded by no more than 5, 10, 15, 20, 25, 30, 35, or 40%, for example, no more than 10%, for example, as assessed by the number of living cells, compared to the population of cells at the beginning of step (i), optionally wherein the number of living cells in the population of cells from step (iii) decreases from the number of living cells in the population of cells at the beginning of step (i).
[0161] 14. The method of any one of embodiments 1-13, wherein the population of cells from step (iii) are not expanded, or expanded by less than 2 hours, for example, less than 1 or 1.5 hours, compared to the population of cells at the beginning of step (i).
[0162] 15. The method of any one of embodiments 1-14, wherein steps (i) and/or (ii) are performed in cell media (for example, serum-free media) comprising IL-2, IL-15 (for example, hetIL-15 (IL15/sIL-15Ra)), IL-7, IL-21, IL-6 (for example, IL-6/sIL-6Ra), a LSD1 inhibitor, a MALT1 inhibitor, or a combination thereof.
[0163] 16. The method of any one of embodiments 1-15, wherein steps (i) and/or (ii) are performed in serum-free cell media comprising a serum replacement.
[0164] 17. The method of embodiment 16, wherein the serum replacement is CTS™ Immune Cell Serum Replacement (ICSR).
[0165] 18. The method of any one of embodiments 1-17, further comprising prior to step (i):
   [0166] (iv) (optionally) receiving a fresh leukapheresis product (or an alternative source of hematopoietic tissue such as a fresh whole blood product, a fresh bone marrow product, or a fresh tumor or organ biopsy or removal (for example, a fresh product from thymectomy)) from an entity, for example, a laboratory, hospital, or healthcare provider, and
   [0167] (v) isolating the population of cells (for example, T cells, for example, CD8+ and/or CD4+ T cells) contacted in step (i) from a fresh leukapheresis product (or an alternative source of hematopoietic tissue such as a fresh whole blood product, a fresh bone marrow product, or a fresh tumor or organ biopsy or removal (for example, a fresh product from thymectomy)), optionally wherein:
   [0168] step (iii) is performed no later than 35 hours after the beginning of step (v), for example, no later than 27, 28, 29, 30, 31, 32, 33, 34, or 35 hours after the beginning of step (v), for example, no later than 30 hours after the beginning of step (v), or
   [0169] the population of cells from step (iii) are not expanded, or expanded by no more than 5, 10, 15, 20, 25, 30, 35, or 40%, for example, no more than 10%, for example, as assessed by the number of living cells, compared to the population of cells at the end of step (v).
[0170] 19. The method of any one of embodiments 1-17, further comprising prior to step (i): receiving cryopreserved T cells isolated from a leukapheresis product (or an alternative source of hematopoietic tissue such as cryopreserved T cells isolated from whole blood, bone marrow, or tumor or organ biopsy or removal (for example, thymectomy)) from an entity, for example, a laboratory, hospital, or healthcare provider.
[0171] 20. The method of any one of embodiments 1-17, further comprising prior to step (i):
   [0172] (iv) (optionally) receiving a cryopreserved leukapheresis product (or an alternative source of hematopoietic tissue such as a cryopreserved whole blood product, a cryopreserved bone marrow product, or a cryopreserved tumor or organ biopsy or removal (for example, a cryopreserved product from thymectomy)) from an entity, for example, a laboratory, hospital, or healthcare provider, and
   [0173] (v) isolating the population of cells (for example, T cells, for example, CD8+ and/or CD4+ T cells) contacted in step (i) from a cryopreserved leukapheresis product (or an alternative source of hematopoietic tissue such as a cryopreserved whole blood product, a cryopreserved bone marrow product, or a cryopreserved tumor or organ biopsy or removal (for example, a cryopreserved product from thymectomy)), optionally wherein:
   [0174] step (iii) is performed no later than 35 hours after the beginning of step (v), for example, no later than 27, 28, 29, 30, 31, 32, 33, 34, or 35 hours after the beginning of step (v), for example, no later than 30 hours after the beginning of step (v), or
   [0175] the population of cells from step (iii) are not expanded, or expanded by no more than 5, 10, 15, 20, 25, 30, 35, or 40%, for example, no more than 10%, for example, as assessed by the number of living cells, compared to the population of cells at the end of step (v).
[0176] 21. The method of any one of embodiments 1-20, further comprising step (vi):
   [0177] culturing a portion of the population of cells from step (iii) for at least 2, 2.5, 3, 3.5, 4, 4.5, 5, 5.5, 6, 6.5, or 7 days, for example, at least 2 days and no more than 7 days, and measuring CAR expression level in the portion (for example, measuring the percentage of viable, CAR-expressing cells in the portion), optionally wherein:
   [0178] step (iii) comprises harvesting and freezing the population of cells (for example, T cells) and step (vi) comprises thawing a portion of the population of cells from step (iii), culturing the portion for at least 2, 2.5, 3, 3.5, 4, 4.5, 5, 5.5, 6, 6.5, or 7 days, for example, at least 2 days and no more than 7 days, and measuring CAR expression level in the portion (for example, measuring the percentage of viable, CAR-expressing cells in the portion).
[0179] 22. A method of making a population of cells (for example, T cells) that express a chimeric antigen receptor (CAR), the method comprising:
   [0180] (1) contacting a population of cells (for example, T cells, for example, T cells isolated from a frozen leukapheresis product) with a cytokine chosen from IL-2, IL-7, IL-15, IL-21, IL-6, or a combination thereof,
   [0181] (2) contacting the population of cells (for example, T cells) with a nucleic acid molecule (for example, a DNA or RNA molecule) encoding the CAR, thereby providing a population of cells (for example, T cells) comprising the nucleic acid molecule, and
   [0182] (3) harvesting the population of cells (for example, T cells) for storage (for example, reformulating the population of cells in cryopreservation media) or administration, wherein:
      [0183] (a) step (2) is performed together with step (1) or no later than 5 hours after the beginning of step (1), for example, no later than 1, 2, 3, 4, or 5 hours after the beginning of step (1), and step (3) is performed no later than 26 hours after the beginning of step (1), for example, no later than 22, 23, or 24 hours after the beginning of step (1), for example, no later than 24 hours after the beginning of step (1), or
      [0184] (b) the population of cells from step (3) are not expanded, or expanded by no more than 5, 10, 15, 20, 25, 30, 35, or 40%, for example, no more than 10%, for example, as assessed by the number of living cells, compared to the population of cells at the beginning of step (1),
      [0185] optionally wherein the nucleic acid molecule in step (2) is on a viral vector, optionally wherein the nucleic acid molecule in step (2) is an RNA molecule on a viral vector, optionally wherein step (2) comprises transducing the population of cells (for example, T cells) with a viral vector comprising a nucleic acid molecule encoding the CAR, optionally wherein step (2) further comprises adding F108 as an adjuvant during transduction and/or contacting the population of cells (for example, T cells) with an shRNA that targets Tet2.
[0186] 23. The method of embodiment 22, wherein step (1) comprises contacting the population of cells (for example, T cells) with IL-2.
[0187] 24. The method of embodiment 22, wherein step (1) comprises contacting the population of cells (for example, T cells) with IL-7.
[0188] 25. The method of embodiment 22, wherein step (1) comprises contacting the population of cells (for example, T cells) with IL-15 (for example, hetIL-15 (IL15/sIL-15Ra)).
[0189] 26. The method of embodiment 22, wherein step (1) comprises contacting the population of cells (for example, T cells) with IL-21.
[0190] 27. The method of embodiment 22, wherein step (1) comprises contacting the population of cells (for example, T cells) with IL-6 (for example, IL-6/sIL-6Ra).
[0191] 28. The method of embodiment 22, wherein step (1) comprises contacting the population of cells (for example, T cells) with IL-7 and IL-15 (for example, hetIL-15 (IL15/sIL-15Ra)).
[0192] 29. The method of embodiment 22, wherein step (1) comprises contacting the population of cells (for example, T cells) with IL-7 and IL-21.
[0193] 30. The method of embodiment 22, wherein step (1) comprises contacting the population of cells (for example, T cells) with IL-15 (for example, hetIL-15 (IL15/sIL-15Ra)) and IL-21.
[0194] 31. The method of embodiment 22, wherein step (1) comprises contacting the population of cells (for example, T cells) with IL-7, IL-15 (for example, hetIL-15 (IL15/sIL-15Ra)), and IL-21.
[0195] 32. The method of embodiment 22, wherein step (1) comprises contacting the population of cells (for example, T cells) with IL-6 (for example, IL-6/sIL-6Ra) and IL-15 (for example, hetIL-15 (IL15/sIL-15Ra)).
[0196] 33. The method of embodiment 22, wherein step (1) comprises contacting the population of cells (for example, T cells) with IL-2 and IL-6 (for example, IL-6/sIL-6Ra).
[0197] 34. The method of any one of embodiments 22-33, wherein the population of cells from step (3) shows a higher percentage of naive cells among CAR-expressing cells (for example, at least 10, 15, 20, 25, 30, 35, or 40% higher), compared with cells made by an otherwise similar method which further comprises contacting the population of cells with, for example, an anti-CD3 antibody.
[0198] 35. The method of any one of embodiments 22-34, wherein the percentage of naive cells, for example, naive T cells, for example, CD45RA+ CD45RO- CCR7+ T cells, in the population of cells from step (3):
   [0199] (a) is the same as or differs by no more than 5 or 10% from the percentage of naive cells, for example, naive T cells, for example, CD45RA+ CD45RO- CCR7+ cells, in the population of cells at the beginning of step (1), or
   [0200] (b) is increased, for example, increased by at least 10 or 20%, as compared to the percentage of naive cells, for example, naive T cells, for example, CD45RA+ CD45RO-CCR7+ cells, in the population of cells at the beginning of step (1).
[0201] 36. The method of any one of embodiments 22-35, wherein the population of cells from step (3) shows a higher percentage of naive cells, for example, naive T cells, for example, CD45RA+ CD45RO- CCR7+ T cells (for example, at least 10, 20, 30, or 40% higher), compared with cells made by an otherwise similar method in which step (3) is performed more than 26 hours after the beginning of step (1), for example, more than 5, 6, 7, 8, 9, 10, 11, or 12 days after the beginning of step (1).
[0202] 37. The method of any one of embodiments 22-36, wherein the population of cells from step (3) shows a higher percentage of naive cells, for example, naive T cells, for example, CD45RA+ CD45RO- CCR7+ T cells (for example, at least 10, 20, 30, or 40% higher), compared with cells made by an otherwise similar method which further comprises, after step (2) and prior to step (3), expanding the population of cells (for example, T cells) in vitro for more than 3 days, for example, for 5, 6, 7, 8 or 9 days.
[0203] 38. The method of any one of embodiments 22-37, wherein the population of cells from step (3), after being administered in vivo, persists longer or expands at a higher level (for example, as assessed using methods described in Example 1 with respect to FIG. 4C), compared with cells made by an otherwise similar method in which step (3) is performed more than 26 hours after the beginning of step (1), for example, more than 5, 6, 7, 8, 9, 10, 11, or 12 days after the beginning of step (1).
[0204] 39. The method of any one of embodiments 22-38, wherein the population of cells from step (3), after being administered in vivo, persists longer or expands at a higher level (for example, as assessed using methods described in Example 1 with respect to FIG. 4C), compared with cells made by an otherwise similar method which further comprises, after step (2) and prior to step (3), expanding the population of cells (for example, T cells) in vitro for more than 3 days, for example, for 5, 6, 7, 8 or 9 days.
[0205] 40. The method of any one of embodiments 22-39, the population of cells from step (3) are not expanded, or expanded by no more than 5, 10, 15, 20, 25, 30, 35, or 40%, for example, no more than 10%, for example, as assessed by the number of living cells, compared to the population of cells at the beginning of step (1), optionally wherein the number of living cells in the population of cells from step (3) decreases from the number of living cells in the population of cells at the beginning of step (1).
[0206] 41. The method of any one of embodiments 22-40, wherein the population of cells from step (3) are not expanded, or expanded by less than 2 hours, for example, less than 1 or 1.5 hours, compared to the population of cells at the beginning of step (1).
[0207] 42. The method of any one of embodiments 22-41, wherein the population of cells is not contacted in vitro with (A) an agent that stimulates a CD3/TCR complex and/or (B) an agent that stimulates a costimulatory molecule and/or growth factor receptor on the surface of the cells, or if contacted, the contacting step is less than 2 hours, for example, no more than 1 or 1.5 hours.
[0208] 43. The method of embodiment 42, wherein the agent that stimulates a CD3/TCR complex is an agent that stimulates CD3 (for example, an anti-CD3 or anti-TCR antibody fragment comprising the respective CDRs provided in Table 27) and wherein the agent that stimulates a costimulatory molecule and/or growth factor receptor is an agent that stimulates CD28 or CD2 (for example, an anti-CD28 or anti-CD2 antibody fragment comprising the respective CDRs provided in Table 27), or any combination thereof, optionally wherein the agent that stimulates a CD3/TCR complex is an agent that stimulates CD3 and the agent that stimulates a costimulatory molecule and/or growth factor receptor are comprised in a multispecific binding molecule, optionally a bispecific antibody configured in any one of the schema provided in FIG. 50A.
[0209] 44. The method of any one of embodiments 22-43, wherein steps (1) and/or (2) are performed in cell media comprising:
   [0210] no more than 5, 4, 3, 2, 1, or 0% serum, optionally wherein steps (1) and/or (2) are performed in cell media comprising about 2% serum, or
   [0211] a LSD1 inhibitor or a MALT1 inhibitor.
[0212] 45. The method of any one of embodiments 22-44, further comprising receiving a cryopreserved leukapheresis product (or an alternative source of hematopoietic tissue such as a cryopreserved whole blood product, a cryopreserved bone marrow product, or a cryopreserved tumor or organ biopsy or removal (for example, a cryopreserved product from thymectomy)) from an entity, for example, a laboratory, hospital, or healthcare provider.
[0213] 46. The method of any one of embodiments 1-45, wherein the population of cells at the beginning of step (i) or step (1) has been enriched for IL6R-expressing cells (for example, cells that are positive for IL6Rα and/or IL6Rβ).
[0214] 47. The method of any one of embodiments 1-46, wherein the population of cells at the beginning of step (i) or step (1) comprises no less than 50, 60, or 70% of IL6R-expressing cells (for example, cells that are positive for IL6Rα and/or IL6Rβ).
[0215] 48. The method of any one of embodiments 1-47, wherein steps (i) and (ii) or steps (1) and (2) are performed in cell media comprising IL-15 (for example, hetIL-15 (IL15/sIL-15Ra)).
[0216] 49. The method of embodiment 48, wherein IL-15 increases the ability of the population of cells to expand, for example, 10, 15, 20, or 25 days later.
[0217] 50. The method of embodiment 48, wherein IL-15 increases the percentage of IL6Rβ-expressing cells in the population of cells.
[0218] 51. The method of any one of embodiments 1-50, wherein the CAR comprises an antigen binding domain, a transmembrane domain, and an intracellular signaling domain.
[0219] 52. The method of embodiment 51, wherein the antigen binding domain binds to an antigen chosen from: CD19, CD20, CD22, BCMA, mesothelin, EGFRvIII, GD2, Tn antigen, sTn antigen, Tn-O-Glycopeptides, sTn-O-Glycopeptides, PSMA, CD97, TAG72, CD44v6, CEA, EPCAM, KIT, IL-13Ra2, leguman, GD3, CD171, IL-11Ra, PSCA, MAD-CT-1, MAD-CT-2, VEGFR2, LewisY, CD24, PDGFR-beta, SSEA-4, folate receptor alpha, ERBBs (for example, ERBB2), Her2/neu, MUC1, EGFR, NCAM, Ephrin B2, CAIX, LMP2, sLe, HMWMAA, o-acetyl-GD2, folate receptor beta, TEM1/CD248, TEM7R, FAP, Legumain, HPV E6 or E7, ML-IAP, CLDN6, TSHR, GPRC5D, ALK, Polysialic acid, Fos-related antigen, neutrophil elastase, TRP-2, CYP1B1, sperm protein 17, beta human chorionic gonadotropin, AFP, thyroglobulin, PLAC1, globoH, RAGE1, MN-CA IX, human telomerase reverse transcriptase, intestinal carboxyl esterase, mut hsp 70-2, NA-17, NY-BR-X1, UPK2, HAVCR1, ADRB3, PANX3, NY-ESO-1, GPR20, Ly6k, OR51E2, TARP, GFRα4, or a peptide of any of these antigens presented on MHC.
[0220] 53. The method of embodiment 51 or 52, wherein the antigen binding domain comprises a CDR, VH, VL, scFv or CAR sequence disclosed herein, optionally wherein:
   [0221] (a) the antigen binding domain binds to BCMA and comprises a CDR, VH, VL, scFv or CAR sequence disclosed in Tables 3-15, or a sequence having at least 80%, 85%, 90%, 95%, or 99% identity thereto;
   [0222] (b) the antigen binding domain binds to CD19 and comprises a CDR, VH, VL, scFv or CAR sequence disclosed in Table 2, or a sequence having at least 80%, 85%, 90%, 95%, or 99% identity thereto;
   [0223] (c) the antigen binding domain binds to CD20 and comprises a CDR, VH, VL, scFv or CAR sequence disclosed herein, or a sequence having at least 80%, 85%, 90%, 95%, or 99% identity thereto; or
   [0224] (d) the antigen binding domain binds to CD22 and comprises a CDR, VH, VL, scFv or CAR sequence disclosed herein, or a sequence having at least 80%, 85%, 90%, 95%, or 99% identity thereto.
[0225] 54. The method of any one of embodiments 51-53, wherein the antigen binding domain comprises a VH and a VL, wherein the VH and VL are connected by a linker, optionally wherein the linker comprises the amino acid sequence of SEQ ID NO: 63 or 104.
[0226] 55. The method of any one of embodiments 51-54, wherein:
   [0227] (a) the transmembrane domain comprises a transmembrane domain of a protein chosen from the alpha, beta or zeta chain of T-cell receptor, CD28, CD3 epsilon, CD45, CD4, CD5, CD8, CD9, CD16, CD22, CD33, CD37, CD64, CD80, CD86, CD134, CD137 and CD154,
   [0228] (b) the transmembrane domain comprises a transmembrane domain of CD8,
   [0229] (c) the transmembrane domain comprises the amino acid sequence of SEQ ID NO: 6, or an amino acid sequence having at least about 85%, 90%, 95%, or 99% sequence identity thereof, or
   [0230] (d) the nucleic acid molecule comprises a nucleic acid sequence encoding the transmembrane domain, wherein the nucleic acid sequence comprises the nucleic acid sequence of SEQ ID NO: 17, or a nucleic acid sequence having at least about 85%, 90%, 95%, or 99% sequence identity thereof.
[0231] 56. The method of any one of embodiments 51-55, wherein the antigen binding domain is connected to the transmembrane domain by a hinge region, optionally wherein:
   [0232] (a) the hinge region comprises the amino acid sequence of SEQ ID NO: 2, 3, or 4, or an amino acid sequence having at least about 85%, 90%, 95%, or 99% sequence identity thereof, or
   [0233] (b) the nucleic acid molecule comprises a nucleic acid sequence encoding the hinge region, wherein the nucleic acid sequence comprises the nucleic acid sequence of SEQ ID NO: 13, 14, or 15, or a nucleic acid sequence having at least about 85%, 90%, 95%, or 99% sequence identity thereof.
[0234] 57. The method of any one of embodiments 51-56, wherein the intracellular signaling domain comprises a primary signaling domain, optionally wherein the primary signaling domain comprises a functional signaling domain derived from CD3 zeta, TCR zeta, FcR gamma, FcR beta, CD3 gamma, CD3 delta, CD3 epsilon, CD5, CD22, CD79a, CD79b, CD278 (ICOS), FcεRI, DAP10, DAP12, or CD66d, optionally wherein:
   [0235] (a) the primary signaling domain comprises a functional signaling domain derived from CD3 zeta,
   [0236] (b) the primary signaling domain comprises the amino acid sequence of SEQ ID NO: 9 or 10, or an amino acid sequence having at least about 85%, 90%, 95%, or 99% sequence identity thereof, or
   [0237] (c) the nucleic acid molecule comprises a nucleic acid sequence encoding the primary signaling domain, wherein the nucleic acid sequence comprises the nucleic acid sequence of SEQ ID NO: 20 or 21, or a nucleic acid sequence having at least about 85%, 90%, 95%, or 99% sequence identity thereof.
[0238] 58. The method of any one of embodiments 51-57, wherein the intracellular signaling domain comprises a costimulatory signaling domain, optionally wherein the costimulatory signaling domain comprises a functional signaling domain derived from a MHC class I molecule, a TNF receptor protein, an Immunoglobulin-like protein, a cytokine receptor, an integrin, a signaling lymphocytic activation molecule (SLAM protein), an activating NK cell receptor, BTLA, a Toll ligand receptor, OX40, CD2, CD7, CD27, CD28, CD30, CD40, CDS, ICAM-1, 4-1BB (CD137), B7-H3, ICOS (CD278), GITR, BAFFR, LIGHT, HVEM (LIGHTR), KIRDS2, SLAMF7, NKp80 (KLRF1), NKp44, NKp30, NKp46, CD19, CD4, CD8alpha, CD8beta, IL2R beta, IL2R gamma, IL7R alpha, ITGA4, VLA1, CD49a, ITGA4, IA4, CD49D, ITGA6, VLA-6, CD49f, ITGAD, CD11d, ITGAE, CD103, ITGAL, CD11a, LFA-1, ITGAM, CD11b, ITGAX, CD11c, ITGB1, CD29, ITGB2, CD18, ITGB7, NKG2D, NKG2C, TNFR2, TRANCE/RANKL, DNAM1 (CD226), SLAMF4 (CD244, 2B4), CD84, CD96 (Tactile), CEACAM1, CRTAM, Ly9 (CD229), CD160 (BY55), PSGL1, CD100 (SEMA4D), CD69, SLAMF6 (NTB-A, Ly108), SLAM (SLAMF1, CD150, IPO-3), BLAME (SLAMF8), SELPLG (CD162), LTBR, LAT, GADS, SLP-76, PAG/Cbp, CD19a, CD28-OX40, CD28-4-1BB, or a ligand that specifically binds with CD83, optionally wherein:
   [0239] (a) the costimulatory signaling domain comprises a functional signaling domain derived from 4-1BB,
   [0240] (b) the costimulatory signaling domain comprises the amino acid sequence of SEQ ID NO: 7, or an amino acid sequence having at least about 85%, 90%, 95%, or 99% sequence identity thereof, or
   [0241] (c) the nucleic acid molecule comprises a nucleic acid sequence encoding the costimulatory signaling domain, wherein the nucleic acid sequence comprises the nucleic acid sequence of SEQ ID NO: 18, or a nucleic acid sequence having at least about 85%, 90%, 95%, or 99% sequence identity thereof.
[0242] 59. The method of any one of embodiments 51-58, wherein the intracellular signaling domain comprises a functional signaling domain derived from 4-1BB and a functional signaling domain derived from CD3 zeta, optionally wherein the intracellular signaling domain comprises the amino acid sequence of SEQ ID NO: 7 (or an amino acid sequence having at least about 85%, 90%, 95%, or 99% sequence identity thereof) and the amino acid sequence of SEQ ID NO: 9 or 10 (or an amino acid sequence having at least about 85%, 90%, 95%, or 99% sequence identity thereof), optionally wherein the intracellular signaling domain comprises the amino acid sequence of SEQ ID NO: 7 and the amino acid sequence of SEQ ID NO: 9 or 10.
[0243] 60. The method of any one of embodiments 51-59, wherein the CAR further comprises a leader sequence comprising the amino acid sequence of SEQ ID NO: 1.
[0244] 61. A population of CAR-expressing cells (for example, autologous or allogeneic CAR-expressing T cells or NK cells) made by the method of any one of embodiments 1-60.
[0245] 62. A population of cells engineered to express a CAR (“a population of CAR-expressing cells”), said population comprising:
   [0246] (a) about the same percentage of naive cells, for example, naive T cells, for example, CD45RO- CCR7+ T cells, as compared to the percentage of naive cells, for example, naive T cells, for example, CD45RO- CCR7+ cells, in the same population of cells prior to being engineered to express the CAR;
   [0247] (b) a change within about 5% to about 10% of naive cells, for example, naive T cells, for example, CD45RO- CCR7+ T cells, for example, as compared to the percentage of naive cells, for example, naive T cells, for example, CD45RO- CCR7+ cells, in the same population of cells prior to being engineered to express the CAR;
   [0248] (c) an increased percentage of naive cells, for example, naive T cells, for example, CD45RO- CCR7+ T cells, for example, increased by at least 1.2, 1.4, 1.6, 1.8, 2.0, 2.2, 2.4, 2.6, 2.8, or 3-fold, as compared to the percentage of naive cells, for example, naive T cells, for example, CD45RO- CCR7+ cells, in the same population of cells prior to being engineered to express the CAR;
   [0249] (d) about the same percentage of central memory cells, for example, central memory T cells, for example, CCR7+CD45RO+ T cells, as compared to the percentage of central memory cells, for example, central memory T cells, for example, CCR7+CD45RO+ T cells, in the same population of cells prior to being engineered to express the CAR;
   [0250] (e) a change within about 5% to about 10% of central memory cells, for example, central memory T cells, for example, CCR7+CD45RO+ T cells, as compared to the percentage of central memory cells, for example, central memory T cells, for example, CCR7+CD45RO+ T cells, in the same population of cells prior to being engineered to express the CAR;
   [0251] (f) a decreased percentage of central memory cells, for example, central memory T cells, for example, CCR7+CD45RO+ T cells, for example, decreased by at least 20, 25, 30, 35, 40, 45, or 50%, as compared to the percentage of central memory cells, for example, central memory T cells, for example, CCR7+CD45RO+ T cells, in the same population of cells prior to being engineered to express the CAR;
   [0252] (g) about the same percentage of stem memory T cells, for example, CD45RA+CD95+IL-2 receptor β+CCR7+CD62L+ T cells, as compared to the percentage of stem memory T cells, for example, CD45RA+CD95+IL-2 receptor β+CCR7+CD62L+ T cells, in the same population of cells prior to being engineered to express the CAR;
   [0253] (h) a change within about 5% to about 10% of stem memory T cells, for example, CD45RA+CD95+IL-2 receptor β+CCR7+CD62L+ T cells, as compared to the percentage of stem memory T cells, for example, CD45RA+CD95+IL-2 receptor β+CCR7+CD62L+ T cells, in the same population of cells prior to being engineered to express the CAR; or
   [0254] (i) an increased percentage of stem memory T cells, for example, CD45RA+CD95+IL-2 receptor β+CCR7+CD62L+ T cells, as compared to the percentage of stem memory T cells, for example, CD45RA+CD95+IL-2 receptor β+CCR7+CD62L+ T cells, in the same population of cells prior to being engineered to express the CAR.
[0255] 63. A population of cells engineered to express a CAR (“a population of CAR-expressing cells”), wherein:
   [0256] (a) the median GeneSetScore (Up TEM vs. Down TSCM) of the population of cells is about the same as or differs by no more than (for example, increased by no more than) about 25, 50, 75, 100, or 125% from the median GeneSetScore (Up TEM vs. Down TSCM) of the same population of cells prior to being engineered to express the CAR;
   [0257] (b) the median GeneSetScore (Up Treg vs. Down Teff) of the population of cells is about the same as or differs by no more than (for example, increased by no more than) about 25, 50, 100, 150, or 200% from the median GeneSetScore (Up Treg vs. Down Teff) of the population of cells prior to being engineered to express the CAR;
   [0258] (c) the median GeneSetScore (Down stemness) of the population of cells is about the same as or differs by no more than (for example, increased by no more than) about 25, 50, 100, 150, 200, or 250% from the median GeneSetScore (Down stemness) of the population of cells prior to being engineered to express the CAR;
   [0259] (d) the median GeneSetScore (Up hypoxia) of the population of cells is about the same as or differs by no more than (for example, increased by no more than) about 125, 150, 175, or 200% from the median GeneSetScore (Up hypoxia) of the population of cells prior to being engineered to express the CAR; or
   [0260] (e) the median GeneSetScore (Up autophagy) of the population of cells is about the same as or differs by no more than (for example, increased by no more than) about 180, 190, 200, or 210% from the median GeneSetScore (Up autophagy) of the population of cells prior to being engineered to express the CAR.
[0261] 64. A pharmaceutical composition comprising the population of CAR-expressing cells of any one of embodiments 61-63 and a pharmaceutically acceptable carrier.
[0262] 65. A method of increasing an immune response in a subject, comprising administering the population of CAR-expressing cells of any one of embodiments 61-63 or the pharmaceutical composition of embodiment 64 to the subject, thereby increasing an immune response in the subject.
[0263] 66. A method of treating a cancer in a subject, comprising administering the population of CAR-expressing cells of any one of embodiments 61-63 or the pharmaceutical composition of embodiment 64 to the subject, thereby treating the cancer in the subject.
[0264] 67. The method of embodiment 66, wherein the cancer is a solid cancer, for example, chosen from: one or more of mesothelioma, malignant pleural mesothelioma, non-small cell lung cancer, small cell lung cancer, squamous cell lung cancer, large cell lung cancer, pancreatic cancer, pancreatic ductal adenocarcinoma, esophageal adenocarcinoma, breast cancer, glioblastoma, ovarian cancer, colorectal cancer, prostate cancer, cervical cancer, skin cancer, melanoma, renal cancer, liver cancer, brain cancer, thymoma, sarcoma, carcinoma, uterine cancer, kidney cancer, gastrointestinal cancer, urothelial cancer, pharynx cancer, head and neck cancer, rectal cancer, esophagus cancer, or bladder cancer, or a metastasis thereof.
[0265] 68. The method of embodiment 66, wherein the cancer is a liquid cancer, for example, chosen from: chronic lymphocytic leukemia (CLL), mantle cell lymphoma (MCL), multiple myeloma, acute lymphoid leukemia (ALL), Hodgkin lymphoma, B-cell acute lymphoid leukemia (BALL), T-cell acute lymphoid leukemia (TALL), small lymphocytic leukemia (SLL), B cell prolymphocytic leukemia, blastic plasmacytoid dendritic cell neoplasm, Burkitt’s lymphoma, diffuse large B cell lymphoma (DLBCL), DLBCL associated with chronic inflammation, chronic myeloid leukemia, myeloproliferative neoplasms, follicular lymphoma, pediatric follicular lymphoma, hairy cell leukemia, small cell- or a large cell-follicular lymphoma, malignant lymphoproliferative conditions, MALT lymphoma (extranodal marginal zone lymphoma of mucosa-associated lymphoid tissue), Marginal zone lymphoma, myelodysplasia, myelodysplastic syndrome, non-Hodgkin lymphoma, plasmablastic lymphoma, plasmacytoid dendritic cell neoplasm, Waldenstrom macroglobulinemia, splenic marginal zone lymphoma, splenic lymphoma/leukemia, splenic diffuse red pulp small B-cell lymphoma, hairy cell leukemia-variant, lymphoplasmacytic lymphoma, a heavy chain disease, plasma cell myeloma, solitary plasmocytoma of bone, extraosseous plasmocytoma, nodal marginal zone lymphoma, pediatric nodal marginal zone lymphoma, primary cutaneous follicle center lymphoma, lymphomatoid granulomatosis, primary mediastinal (thymic) large B-cell lymphoma, intravascular large B-cell lymphoma, ALK+ large B-cell lymphoma, large B-cell lymphoma arising in HHV8-associated multicentric Castleman disease, primary effusion lymphoma, B-cell lymphoma, acute myeloid leukemia (AML), or unclassifiable lymphoma.
[0266] 69. The method of any one of embodiments 65-68, further comprising administering a second therapeutic agent to the subject.
[0267] 70. The method of embodiment 69, wherein the second therapeutic agent is IL-15 (for example, hetIL-15 (IL15/sIL-15Ra)).
[0268] 71. The method of embodiment 69, wherein the second therapeutic agent is ibrutinib.
[0269] 72. The method of embodiment 71, wherein ibrutinib is administered once daily at a dose of about 600 mg, about 550 mg, about 500 mg, about 480 mg, about 460 mg, about 440 mg, about 420 mg, about 400 mg, about 350 mg, about 300 mg, about 280 mg, about 250 mg, about 200 mg, about 190 mg, about 180 mg, about 170 mg, about 160 mg, about 150 mg, about 140 mg, about 130 mg, about 120 mg or 100 mg.
[0270] 73. The method of embodiment 71, wherein ibrutinib is administered once daily at a dose of 420 mg, 280 mg, or 140 mg.
[0271] 74. The method of any one of embodiments 71-73, wherein ibrutinib is administered prior to, concurrently with, or after the administration of the population of CAR-expressing cells.
[0272] 75. The method of any one of embodiments 65-74, wherein the population of CAR-expressing cells is administered at a dose determined based on the percentage of CAR-expressing cells measured in embodiment 21.
[0273] 76. The method of any one of embodiments 65-75, wherein the population of CAR-expressing cells (for example, CD19 CAR-expressing cells) is administered at a dose of about 0.5 × 10⁶ to 50 × 10⁶ viable CAR-expressing cells, for example, about 5 × 10⁶ viable CAR-expressing cells, optionally wherein the population of CAR-expressing cells (for example, CD19 CAR-expressing cells) is administered at a dose of 5 × 10⁶ viable CAR-expressing cells.
[0274] 77. The method of any one of embodiments 65-75, wherein the population of CAR-expressing cells (for example, CD19 CAR-expressing cells) is administered at a dose of about 2.5 × 10⁶ to 2.5 × 10⁸ viable CAR-expressing cells, for example, about 2.5 × 10⁷ viable CAR-expressing cells, optionally wherein the population of CAR-expressing cells (for example, CD19 CAR-expressing cells) is administered at a dose of 2.5 × 10⁷ viable CAR-expressing cells.
[0275] 78. The method of any one of embodiments 65-75, wherein the population of CAR-expressing cells (for example, CD19 CAR-expressing cells) is administered at a dose of about 1.25 × 10⁷ to 1.25 × 10⁹ viable CAR-expressing cells, for example, about 1.25 × 10⁸ viable CAR-expressing cells, optionally wherein the population of CAR-expressing cells (for example, CD19 CAR-expressing cells) is administered at a dose of 1.25 × 10⁸ viable CAR-expressing cells.
[0276] 79. The method of any one of embodiments 65-75, wherein the population of CAR-expressing cells (for example, BCMA CAR-expressing cells) is administered at a dose of about 2.5 × 10⁶ to 2.5 × 10⁸ viable CAR-expressing cells, for example, about 1 × 10⁷ or 5 × 10⁷ viable CAR-expressing cells.
[0277] 80. The method of any one of embodiments 66-79, wherein the subject has CLL or SLL.
[0278] 81. The method of any one of embodiments 66-79, wherein the subject has DLBCL, for example, relapsed and/or refractory DLBCL.
[0279] 82. The method of any one of embodiments 65-81, wherein the subject is monitored for a sign of Cytokine Release Syndrome, for example, for at least 2, 2.5, 3, 3.5, or 4 days, for example, for about 3 days.
[0280] 83. The population of CAR-expressing cells of any one of embodiments 61-63 or the pharmaceutical composition of embodiment 64 for use in a method of increasing an immune response in a subject, said method comprising administering to the subject an effective amount of the population of CAR-expressing cells or an effective amount of the pharmaceutical composition.
[0281] 84. The population of CAR-expressing cells of any one of embodiments 61-63 or the pharmaceutical composition of embodiment 64 for use in a method of treating a cancer in a subject, said method comprising administering to the subject an effective amount of the population of CAR-expressing cells or an effective amount of the pharmaceutical composition.

[0282] Although methods and materials similar or equivalent to those described herein can be used in the practice or testing of the present invention, suitable methods and materials are described below. All publications, patent applications, patents, and other references (for example, sequence database reference numbers) mentioned herein are incorporated by reference in their entirety. For example, all GenBank, Unigene, and Entrez sequences referred to herein, for example, in any Table herein, are incorporated by reference. When one gene or protein references a plurality of sequence accession numbers, all of the sequence variants are encompassed.

[0283] In addition, the materials, methods, and examples are illustrative only and not intended to be limiting. Headings, sub-headings or numbered or lettered elements, for example, (a), (b), (i) etc., are presented merely for ease of reading. The use of headings or numbered or lettered elements in this document does not require the steps or elements be performed in alphabetical order or that the steps or elements are necessarily discrete from one another. Other features, objects, and advantages of the invention will be apparent from the description and drawings, and from the claims.

### BRIEF DESCRIPTION OF THE FIGURES

[0284] FIGS. 1A-1I: When purified T cells were incubated with cytokines, the naive cells were the predominant population transduced. FIG. 1A is a graph showing exemplary cytokine process. FIG. 1B is a pair of graphs showing the percentages of CD3+ CAR+ cells at each indicated time point after transduction. FIG. 1C is a set of graphs showing the transduction within the CD3+CCR7+CD45RO- population in a CD3/CD28 bead stimulated populations (left) compared to cytokines only populations (right) in two independent donors. For the sample referred to as “Short stim IL7+IL15” in FIG. 1C, the cells were stimulated with beads for 2 days and then they were removed in the presence of IL7 and IL15. FIGS. 1D, 1E, and 1F are a set of flow cytometry graphs showing the transduction of T-cell subsets cultured with IL2 (FIG. 1D), IL15 (FIG. 1E), and IL7+IL15 (FIG. 1F) daily over a three-day period. FIG. 1G is a set of flow cytometry graphs showing the T cell differentiation on day 0 (left) and on day 1 (right) for CCR7 and CD45RO after stimulation with IL2 (upper right panel) or IL-15 (lower right panel). FIGS. 1H and 1I are a set of graphs showing the percentages of CD3+CCR7+RO-, CD3+CCR7+RO+, CD3+CCR7-RO+, and CD3+CCR7-RO- cells at day 0 or after 24-hour incubation with the indicated cytokines.

[0285] FIGS. 2A-2D: CARTs generated with one day of cytokine stimulation were functional. FIG. 2A: Purified T cells were transduced with a MOI of 1 and in all the cytokine conditions tested, the percentages of CAR-expressing cells observed at day 1 and day 10 were similar. The CARTs were generated within one day and expanded via CD3/CD28 beads after harvest for 9 days to mimic the in vivo setting. FIG. 2A is a pair of graphs showing the average percentages of CD3+ CAR+ cells under each condition for day 1 CARTs (left) and day 10 CARTs (right). FIG. 2B: The cytotoxicity capacity of the day 1 CARTs post expansion was measured using Nalm6 as the target cells. FIG. 2B is a graph showing % killing of CD19 positive Nalm6 cells by CARTs from each condition. Day 10 CARTs expanded using CD3/CD28 beads are marked as “Day 10.” All the other samples were day 1 CARTs. FIG. 2C: The secretion of IFNg of the expanded day 1 CARTs in response to Nalm6 target cells was tested. FIG. 2C is a graph showing the amount of IFN-gamma secretion by CARTs from each condition in the presence of CD19 positive or CD19 negative target cells. FIG. 2D: The proliferative capacity of the day 1 CARTs was tested by measurement of the incorporation of EDU. FIG. 2D is a graph showing the average percentages of EDU-positive cells for each condition. Similar to FIG. 2B, day 10 CARTs are marked as “Day 10” and all the other samples were day 1 CARTs.

[0286] FIGS. 3A-3B: The impact of MOI and media composition on transduction on day 0. FIG. 3A: Purified T cells were transduced with a range of MOIs from 1 to 10 in the presence of IL15, IL2+IL15, IL2+IL7, or IL7+IL15. Regardless of cytokine used, a linear increase in transduction was observed. FIG. 3A is a set of graphs where the percentages of CD3+ CAR+ cells are plotted against MOIs for each condition tested. FIG. 3B: The composition of the media impacted the transduction in the cytokine process. FIG. 3B is a pair of graphs showing the percentages of CD3+ CAR+ cells on day 1 (left) or day 8 (right) for each condition tested. “2.50” indicates a MOI of 2.50. “5.00” indicates a MOI of 5.00.

[0287] FIGS. 4A-4D: CAR T cells generated within 24 hours can eliminate tumor. FIG. 4A: Purified T cells were transduced with an anti-CD19 CAR and 24 hours later were harvested. FIG. 4A is a set of flow cytometry plots showing the transduction of T cells with the anti-CD19 CAR that were cultured with IL2, IL15 and IL7+IL15, illustrating the transduction with each cytokine condition. FIG. 4B: A graph showing average viability which was above 80% in all the conditions tested. FIG. 4C: The expansion of the day 1 CARTs in the peripheral blood is increased in vivo as compared to their day 10 counterparts. The percentage of live CD45+CD11b-CD3+CAR+ cells at indicated time points after infusion for each condition tested. The day 10 CARTs are marked as “D10 1e6” or “D10 5e6” and all the other samples were day 1 CARTs. FIG. 4D: The day 1 CARTs could eliminate tumor in vivo although with a delayed kinetics as compared to the day 10 CARTs. FIG. 4D is a graph showing total flux at indicated time points after tumor inoculation for each condition tested. CARTs were administered 4 days after tumor inoculation. The day 10 CARTs are marked as “5e6 d. 10” and all the other samples were day 1 CARTs.

[0288] FIGS. 5A-5B: The cytokine process was scalable. FIG. 5A: The T cells were enriched on a CliniMACS® Prodigy® and the B cell compartment was reduced to less than 1%. FIG. 5A is a set of flow cytometry plots showing the staining of cells with an anti-CD3 antibody (left) or an anti-CD19 antibody and an anti-CD14 antibody (right) for leukopak cells (upper) or cells post CD4+CD8+ enrichment (lower). FIG. 5B: Purified T cells from a frozen apheresis were transduced with an anti-CD19 CAR in either a 24 well plate or a PL30 bag post enrichment. The CARTs were harvested 24 hours later. FIG. 5B is a set of flow cytometry plots showing staining for CD3 and CAR of cells manufactured in the presence of either IL2 or hetIL-15 (IL15/sIL-15Ra).

[0289] FIGS. 6A-6C: The CARTs manufactured by the activation process showed superior anti-tumor efficacy in vivo. FIGS. 6A and 6B are graphs where tumor burden is plotted against the indicated time point after tumor implantation. “d.1” indicates CARTs manufactured using the activation process. “d.9” indicates CARTs manufactured with a traditional 9-day expansion protocol, serving as a positive control in this study. FIG. 6C is a set of representative images showing bioluminescence from mice.

[0290] FIGS. 7A-7B: IL6Rα and IL6Rβ expressing cells were enriched in less differentiated T cell population. Fresh T cells were stained for indicated surface antigens and examined for expression levels of IL6Rα and IL6Rβ on CD4 (FIG. 7A) and CD8 (FIG. 7B) T cell subsets.

[0291] FIGS. 8A and 8B: Both IL6Rα and IL6Rβ expressing cells were enriched in less differentiated T cell population. Fresh T cells were stained for indicated surface antigens and examined for expression levels of indicated surface antigens on CD4 (FIG. 8A) and CD8 (FIG. 8B) T cell subsets.

[0292] FIG. 9: IL6Rα expressing cells expressed surface markers of less differentiated T cells. Fresh T cells were stained for indicated surface antigens and examined for expression levels of various surface antigens in IL6Rα high, middle, and low expressing cell subsets.

[0293] FIG. 10: IL6Rβ expressing cells expressed surface markers of less differentiated T cells. Fresh T cells were stained for indicated surface antigens and examined for expression levels of various surface antigens in IL6Rβ high, middle, and low expressing cell subsets.

[0294] FIG. 11: IL6Rα but not IL6Rβ expression was down-regulated following TCR engagement. T cells were activated with αCD3αCD28 beads at day 0 and then examined for expression levels of IL6Rα and IL6Rβ at indicated time points.

[0295] FIG. 12: Fold expansion of cytokine treated T cells after TCR engagement. T cells were activated with αCD3αCD28 beads at day 0 in the presence of indicated cytokines and then monitored for cell numbers at indicated time points.

[0296] FIGS. 13A and 13B: IL2, IL7, and IL15 treatment did not affect cell size and viability after TCR engagement. T cells were activated with αCD3αCD28 beads at day 0 in the presence of indicated cytokines and then monitored for cell size (FIG. 13A) and viability (FIG. 13B) at indicated time points.

[0297] FIG. 14: Expression kinetics of various surface molecules on CD4 T cells after cytokine treatment. T cells were activated with αCD3αCD28 beads at day 0 in the presence of indicated cytokines and then examined for expression of various surface molecules by flow cytometry at indicated time points.

[0298] FIG. 15: Expression kinetics of various surface molecules on CD8 T cells after cytokine treatment. T cells were activated with αCD3αCD28 beads at day 0 in the presence of indicated cytokines and then examined for expression of various surface molecules by flow cytometry at indicated time points.

[0299] FIG. 16: IL6Rβ expression was mainly restricted on CD27 expressing T cell subsets after TCR engagement. T cells were activated with αCD3αCD28 beads at day 0 in the presence of indicated cytokines and then examined for IL6Rβ expression by flow cytometry at day 15.

[0300] FIG. 17: IL6Rβ expression was mainly restricted on CD57 non-expressing T cell subsets after TCR engagement. T cells were activated with αCD3αCD28 beads at day 0 in the presence of indicated cytokines and then examined for IL6Rβ expression by flow cytometry at day 25.

[0301] FIG. 18: Common γ-chain cytokine treated T cells produced functional cytokines at day 25. T cells were activated with αCD3αCD28 beads at day 0 in the presence of indicated cytokines and then examined for percentages of IL2, IFNγ, and TNFα producing T cells by flow cytometry at day 25.

[0302] FIGS. 19A and 19B: BCMA CAR expression on Day 1 using ARM at MOI=2.5 in T cells from two healthy donors. FIG. 19A is a panel of histograms showing BCMA CAR expression as measured by flow cytometry. FIG. 19B is a table listing reagents/conditions used in the flow cytometry analysis.

[0303] FIGS. 20A, 20B, and 20C: In vitro CAR expression kinetics from day 1 to day 4 of cells manufactured using the ARM process. CARs were stably expressed on day 3. FIG. 20A is a panel of histograms showing CAR expression at the indicated time points measured by flow cytometry. FIGS. 20B and 20C are graphs showing CAR+% and MFI values over time, respectively.

[0304] FIGS. 21A and 21B: In vivo triage in a KMS-11-luc multiple myeloma xenograft mouse model. Each mouse received 1.5E6 of day 1 CART product. FIG. 21A is a panel of histograms showing the day 1 and day 7 CAR expression in the CART cells. FIG. 21B is a graph showing the tumor kinetics (BLI level) after CART treatment.

[0305] FIGS. 22A, 22B, and 22C: In vivo triage of BCMA CAR using dose titration in a KMS-11-luc multiple myeloma xenograft mouse model. FIG. 22A is a panel of histograms showing the CAR expression at day 1 and day 3. FIG. 22B is a graph showing tumor intake kinetics after CART treatment using two different doses: a dose of 1.5e5 CAR+ T cells and a dose of 5e4 CAR+ T cells. The doses of CAR+ cells were normalized based on the day 3 CAR expression. FIG. 22C is a graph showing body weight kinetics over the course of this study.

[0306] FIGS. 23A, 23B, and 23C. FIGS. 23A and 23B are graphs showing percentage of T cell expressing the CAR on their cell surface (FIG. 23A) and mean fluorescence intensity (MFI) of CD3+CAR+ cells (FIG. 23B) observed over time (replicate efficiencies are averaged from the two flow panels shown in FIG. 23C). FIG. 23C is a panel of flow cytometry plots showing gating strategy for surface CAR expression on viable CD3+ cells, as based on UTD samples. Numbers in the plots indicate percent CAR positive.

[0307] FIGS. 24A and 24B. FIG. 24A is a graph showing end-to-end composition of the starting material (Prodigy® product) and at harvest at various time points after culture initiation. Naive (n), central memory (cm), effector memory (em), and effector (eff) subsets were defined by CD4, CD8, CCR7, and CD45RO surface expression or lack thereof. CD4 composition is indicated. For each time point, the left bar shows cell composition of the overall CD3+ population (bulk) and the right bar shows cell composition of the CAR+ fraction. FIG. 24B is a panel of flow cytometry plots showing gating strategy applied on live CD3+ events to determine overall transduction efficiency (top row), CD4/CD8 composition (middle row), and memory subsets (bottom row) within the overall CD3+ population (bulk) and the CAR+ fraction.

[0308] FIG. 25. Kinetics of T cell subsets expressing surface CAR over time, expressed as number of viable cells in the respective subsets.

[0309] FIG. 26. Viable cell recovery (number of viable cells recovered at harvest versus number of viable cells seeded) 12 to 24 hours after culture initiation as determined from pre-wash counts.

[0310] FIG. 27. Viability of rapid CARTs harvested 12 to 24 hours after culture initiation, as determined pre-wash and post-wash at the time of harvest.

[0311] FIGS. 28A, 28B, 28C, and 28D. FIG. 28A is a graph showing composition of the starting material (healthy donor leukopak; LKPK) and the T cell-enriched product as analyzed by flow cytometry. Numbers indicate % of parent (live, single cells). T: T cells; mono: monocytes; B: B cells; CD56 (NK): NK cells. FIG. 28B is a panel of flow cytometry plots showing gating strategy on live CD3+ events used to determine transduction rate (forward scatter FSC vs. CAR) and T cell subsets (CD4 vs. CD8 and CCR7 vs. CD45RO). For ARM-CD19 CAR (CD19 CART cells manufactured using the Activated Rapid Manufacturing (ARM) process) and TM-CD19 CAR (CD19 CART cells manufactured using the traditional manufacturing (TM) process), the left lower panels represent bulk cultures, while the right panels represent CAR+ T cells. “ARM-UTD” and “TM-UTD” refer to untransduced T cells (UTD) manufactured according to the ARM and the TM processes, respectively. Numbers in quadrants indicate % of parental population. Boxes in the TM-UTD and TM-CD19 CAR plots indicate skewing toward a T_{CM} phenotype for the TM process. Boxes in the ARM-UTD and ARM-CD19 CAR plots indicate the maintenance of naive-like cells by the ARM process. NA: not applicable. FIG. 28C is a graph showing end-to-end T cell composition of ARM-CD19 CAR and TM-CD19 CAR. Composition is shown for “bulk” and “CAR+” populations where applicable. The percentage of the respective populations refers to % of parental, either CD3+ or CAR+CD3+ as applicable. The % of CD4 cells of the respective bulk or CAR+ population is indicated. LKPK: Leukopak starting material; 4 and 8: CD4+ and CD8+, respectively; eff: effector; em: effector memory; cm: central memory; n: naive-like. Data is representative of 3 full-scale runs with 3 different healthy donors (n= 3) and several small-scale runs used to optimize the process. FIG. 28D is a table showing the percentages shown in FIG. 28C.

[0312] FIGS. 29A, 29B, 29C, and 29D. Cytokine concentration in cell culture supernatants. IFN-γ (FIGS. 29A and 29B) and IL-2 (FIGS. 29C and 29D). FIGS. 29A and 29C: TM-CD19 CAR, ARM-CD19 CAR, and respective UTD were co-cultured with NALM6-WT (ALL), TMD-8 (DLBCL), or without cancer cells (T cells alone). Supernatant was collected 48h later. FIGS. 29B and 29D: ARM-CD19 CAR was cocultured with NALM6-WT, NALM6-19KO (CD19-negative) or alone. Supernatant was collected after 24 h or 48 h. To further assess antigen-specific cytokine secretion, ARM-CD19 CAR was cultured alone for 24 h, washed and then co-cultured with target cells for 24 h. Data shown is derived from 2 healthy donor T cells and is representative of 2 experiments with three donors total.

[0313] FIGS. 30A, 30B, and 30C. FIG. 30A is a graph outlining the xenograft mouse model to study the anti-tumor activity of ARM-CD19 CAR. FIG. 30B is a panel of flow cytometry plots showing determination of CAR expression on ARM-CD19 CAR cells from a sentinel vial. ARM-CD19 CAR cells were cultured for the time period described in the figure, prior to flow-cytometry analysis. Gating for CAR expression was based on an isotype control (Iso) staining. FIG. 30C is a graph showing in vivo efficacy of ARM-CD19 CAR in the xenograft mouse model. NSG mice were injected with the pre-B ALL line NALM6, expressing the luciferase reporter gene; the tumor burden is expressed as total body luminescence (p/s), depicted as mean tumor burden with 95% confidence interval. On day 7 post tumor inoculation, mice were treated with ARM-CD19 CAR or TM-CD19 CAR at the respective doses (number of viable CAR+ T cells). High dose ARM-CD19 CAR group was terminated on day 33 due to onset of X-GVHD. Vehicle (PBS) and non-transduced T cells (UTD) served as negative controls. n=5 mice for all groups, except n=4 for ARM-UTD 1×10⁶ dose and all TM-CD19 CAR dose groups. Five xenograft studies were run with CAR-T cells generated from 5 different healthy donors, three of which included a comparison to TM-CD19 CAR.

[0314] FIGS. 31A, 31B, 31C, and 31D. Plasma cytokine levels of NALM6 tumor-bearing mice treated with ARM-CD19 CAR or TM-CD19 CAR at respective CAR-T cell doses. Mice were bled and plasma cytokine measured by MSD assay. IFN-γ (FIGS. 31A and 31B) and IL-2 (FIGS. 31C and 31D) are shown for mice treated with CAR-T (FIGS. 31A and 31C) or ARM-and TM-UTD cells (FIGS. 31B and 31D). Bars within each dose represent the mean cytokine level within the group at different time points (from left: day 4, 7, 10, 12, 16, 19, 23, 26). Horizontal bars and numbers indicate the fold-change comparisons between ARM-CD19 CAR (1×10⁶ dose group) and TM-CD19 CAR (0.5×10⁶ dose group) described in the text: 3-fold for IFN-y; and 10-fold for IL-2. Groups taken down due to tumor burden or body weight loss do not show the last time points. Plasma cytokine levels were measured for 2 studies. no tum: no tumor.

[0315] FIG. 32. Time course of total and CAR+ T cell concentrations in NALM6 tumor-bearing mice treated with PBS vehicle, UTD, TM-CD19 CAR, or ARM-CD19 CAR. Blood samples were taken at 4, 7, 14, 21 and 28 days post CAR-T cell injection. Total T cells (CD3+, upper) and CAR+ T cell (CD3+CAR+, lower) concentrations were analyzed by flow cytometry at designed time points, depicted as mean cells with 95% confidence interval.

[0316] FIGS. 33A and 33B. IL-6 protein levels in three-party co-culture supernatants in pg/mL. ARM-CD19 CAR/K562 co-cultured cells (FIG. 33A) or TM-CD19 CAR/K562 cell co-cultured cells (FIG. 33B), for 6 or 24 hours incubated at different ratios (1:1 and 1:2.5), were then added to PMA-differentiated THP-1 cells for another 24 hours. Results from CAR-T cells co-cultured with K562-CD19 cells, CAR-T cells co-cultured with K562-Mesothelin cells, and CAR-T cells alone are shown. 1:5 ratios are not shown for clarity. ARM-CD19 CAR only and TM-CD19 CAR only designated bars represent CAR-T cell cultures (6 h, 24 h) without target cells. Mean + SEM, duplicates of n= 1 (TM-CD19 CAR) and n= 3 (ARM-CD19 CAR).

[0317] FIGS. 34A, 34B, and 34C. ARM process preserves BCMA CAR+T cell stemness. PI61, R1G5 and BCMA10 CART cells manufactured using the ARM process were assessed for CAR expression at thaw (FIG. 34A) and 48 h post-thaw (FIG. 34B). CCR7/CD45RO markers were also assessed for the 48 h post-thaw product (FIG. 34C). Data shown is one representative from two experiments performed using two donor T cells.

[0318] FIGS. 35A and 35B. The TM process mainly resulted in central-memory T cells (TCM) (CD45RO+/CCR7+), while the naive-like T cell population is almost gone in the CAR+T cells with TM process. PI61, R1G5 and BCMA10 CART cells manufactured using the TM process were assessed for CAR expression at day 9 (FIG. 35A). CCR7/CD45RO markers were also assessed at day 9 post-thaw product (FIG. 35B). Data shown is one representative from two experiments performed using two donor T cells.

[0319] FIGS. 36A, 36B, 36C, and 36D. ARM processed BCMA CAR-T cells demonstrates BCMA-specific activation and secretes higher levels of IL2 and IFN-γ. IL-2 and IFN-γ concentrations in cell culture supernatants. PI61, R1G5 and BCMA10 CART cells manufactured using the ARM or TM process, and respective UTD were co-cultured with KMS-11 at 2.5:1 ratio. Supernatants were collected 20 h later. For the ARM products, IFN-γ concentrations are shown in FIG. 36A and IL-2 concentrations are shown in FIG. 36B. For the TM products, IFN-γ concentrations are shown in FIG. 36C and IL-2 concentrations are shown in FIG. 36D. Data shown is one representative from two experiments performed using two donor T cells.

[0320] FIGS. 37A, 37B, and 37C. Single cell RNA-seq data for input cells (FIG. 37A), Day 1 cells (FIG. 37B), and Day 9 cells (FIG. 37C). The “nGene” graphs show the number of expressed genes per cell. The “nUMI” graphs show the number of unique molecular identifiers (UMIs) per cell.

[0321] FIGS. 38A, 38B, 38C, and 38D. T-Distributed Stochastic Neighbor Embedding (TSNE) plots comparing input cells (FIG. 38A), Day 1 cells (FIG. 38B), and Day 9 cells (FIG. 38C) for a proliferation signature, which was determined based on expression of genes CCNB1, CCND1, CCNE1, PLK1, and MKI67. Each dot represents a cell in that sample. Cells shown as light grey do not express the proliferation genes whereas dark shaded cells express one or more of the proliferation genes. FIG. 38D is a violin plot showing the distribution of gene set scores for a gene set comprised of genes that characterize a resting vs. activated T cell state for Day 1 cells, Day 9 cells, and input cells. In FIG. 38D, a higher gene set score (Up resting vs. Down activated) indicates an increasing resting T cell phenotype, whereas a lower gene set score (Up resting vs. Down activated) indicates an increasing activated T cell phenotype. Input cells were overall in more of a resting state compared to Day 9 and Day 1 cells. Day 1 cells show the greatest activation gene set score.

[0322] FIGS. 39A, 39B, 39C, 39D and 39E. Gene set analysis for input cells, Day 1 cells, and Day 9 cells. In FIG. 39A, a higher gene set score for the gene set “Up TEM vs. Down TSCM” indicates an increasing effector memory T cell (TEM) phenotype of the cells in that sample, whereas a lower gene set score indicates an increasing stem cell memory T cell (TSCM) phenotype. In FIG. 39B, a higher gene set score for the gene set “Up Treg vs. Down Teff” indicates an increasing regulatory T cell (Treg) phenotype, whereas a lower gene set score indicates an increasing effector T cell (Teff) phenotype. In FIG. 39C, a lower gene set score for the gene set “Down stemness” indicates an increasing stemness phenotype. In FIG. 39D, a higher gene set score for the gene set “Up hypoxia” indicates an increasing hypoxia phenotype. In FIG. 39E, a higher gene set score for the gene set “Up autophagy” indicates an increasing autophagy phenotype. Day 1 cells looked similar to the input cells in terms of memory, stem-like and differentiation signature. Day 9 cells, on the other hand, show a higher enrichment for metabolic stress.

[0323] FIGS. 40A, 40B, and 40C. Gene cluster analysis for input cells. FIGS. 40A-40C are violin plots showing the gene set scores from gene set analysis of the four clusters of the input cells. Each dot overlaying the violin plots in FIGS. 40A-40C represents a cell’s gene set score. In FIG. 40A, a higher gene set score of the gene set “Up Treg vs. Down Teff″ indicates an increasing Treg cell phenotype, whereas a lower gene set score of the gene set “Up Treg vs. Down Teff″ indicates an increasing Teff cell phenotype. In FIG. 40B, a higher gene set score of the gene set “Progressively up in memory differentiation” indicates an increasing late memory T cell phenotype, whereas a lower gene set score of the gene set “Progressively up in memory differentiation” indicates an increasing early memory T cell phenotype. In FIG. 40C, a higher gene set score of the gene set “Up TEM vs. Down TN” indicates an increasing effector memory T cell phenotype, whereas a lower gene set score of the gene set “Up TEM vs. Down TN” indicates an increasing naive T cell phenotype. The cells in Cluster 3 are shown to be in a later memory, further differentiated T cell state compared to the cells in Cluster 1 and Cluster 2 which are in an early memory, less differentiated T cell state. Cluster 0 appears to be in an intermediate T cell state. Taken together, this data shows that there is a considerable level of heterogeneity within input cells.

[0324] FIGS. 41A, 41B, and 41C. TCR sequencing and measuring clonotype diversity. Day 9 cells have flatter distribution of clonotype frequencies (higher diversity).

[0325] FIG. 42 is a flow chart showing the design of a Phase I clinical trial testing BCMA CART cells manufactured using the ARM process in adult patients with relapsed and/or refractory multiple myeloma.

[0326] FIG. 43 is a graph showing FACS analyses for ARM-BCMA CAR expression at different collection time points post viral addition in the presence or absence of AZT at two different concentrations (30 µM and 100 µM). Lentiviral vector was added 1 h later prior to AZT treatment at the time of activation and cell seeding.

[0327] FIGS. 44A and 44B are graphs showing assessment of ARM-BCMA CAR for CAR expression at thaw (FIG. 44A) and 48 h post-thaw and CCR7/CD45RO markers at 48 h post-thaw product as well as day 9 for TM-BCMA CAR (FIG. 44B). Data shown is one representative from two experiments performed using T cells from two donors.

[0328] FIGS. 45A and 45B are graphs showing cytokine concentrations in cell culture supernatants. ARM-BCMA CAR and TM-BCMA CAR, and respective UTD were co-cultured with KMS-11. Supernatant was collected 24 h later. Data shown is one representative from two experiments performed using T cells from two donors.

[0329] FIG. 46 is a graph showing outline of xenograft efficacy study to test ARM-BCMA.

[0330] FIG. 47 is a graph comparing the efficacy of ARM-BCMA CAR with that of TM-BCMA CAR in a xenograft model. NSG mice were injected with MM cell line KMS11, expressing the luciferase reporter gene. The tumor burden is expressed as total body luminescence (p/s), depicted as mean tumor burden +SEM. On day 8 post tumor inoculation, mice were treated with ARM-BCMA CAR or TM-BCMA CAR at the respective doses (number of viable CAR+ T cells). Vehicle (PBS) and UTD T cells served as negative controls. N=5 mice for all groups, except N=4 for ARM-BCMA CAR (1e4 cells), PBS, and UTD groups.

[0331] FIGS. 48A, 48B, and 48C are graphs showing plasma IFN-γ kinetics of mice treated with ARM-BCMA CAR or TM-BCMA CAR. Plasma IFN-γ levels of KMS 11-luc tumor-bearing mice treated with UTD, ARM-BCMA CAR, or TM-BCMA CAR at respective CAR-T doses. All IFN-γ levels were depicted as mean ± SEM. Mice were bled and plasma cytokine measured by Meso Scale Discovery (MSD) assay.

[0332] FIG. 49 is a graph showing cellular kinetics of ARM-BCMA CAR and TM-BCMA CAR in vivo. Cellular kinetics in peripheral blood of KMS 11 tumor-bearing mice treated with TM UTD, ARM UTD, ARM-BCMA CAR, and TM-BCMA CAR at different doses. Cell count is expressed as mean cell count +SD. On day 8 post tumor inoculation, mice were treated with ARM-BCMA CAR or TM-BCMA CAR at the respective doses (number of viable CAR+ T cells). Vehicle (PBS) and UTD T cells served as negative controls. Blood samples were taken at 7, 14, and 21 days post CAR-T injection and were analyzed by flow cytometry at designed time points. N=5 mice for all groups, except N=4 for ARM-BCMA CAR (1e4 cells), PBS, and UTD groups

[0333] FIGS. 50A-C provide exemplary schema for bispecific antibodies, including single bispecific antibody schema (FIG. 50A), multimeric bispecific antibody schema (FIG. 50B), and a figure legend (FIG. 50C).

[0334] FIGS. 51A-B depict schema of the 17 different constructs comprising a CD3 antigen binding domain comprising a heavy and light chain derived from an anti-CD3 antibody and, in all but control Constructs 11, 14, and 17, an a CD28 or CD2 antigen binding domain, as noted, comprising a heavy and light chain derived from an anti-CD28 or CD2 antibody, respectively.

[0335] Construct 1 comprises an anti-CD3 scFv fused to an anti-CD2 Fab, which is further fused to an Fc region. Construct 1 comprises a first chain and a second chain. The first chain comprises, from the N-terminus to the C-terminus, anti-CD2 VL and CL. The second chain comprises, from the N-terminus to the C-terminus, anti-CD3 VH, (G4S)4 linker (SEQ ID NO: 63), anti-CD3 VL, (G4S)4 linker (SEQ ID NO: 63), anti-CD2 VH, CH1, CH2, and CH3. Construct 2 comprises an anti-CD3 scFv fused to an anti-CD28 Fab, which is further fused to an Fc region. Construct 2 comprises a first chain and a second chain. The first chain comprises, from the N-terminus to the C-terminus, anti-CD28 VL and CL. The second chain comprises, from the N-terminus to the C-terminus, anti-CD3 VH, (G4S)4 linker (SEQ ID NO: 63), anti-CD3 VL, (G4S)4 linker (SEQ ID NO: 63), anti-CD28 VH, CH1, CH2, and CH3.

[0336] Construct 3 comprises an anti-CD2 Fab fused to an Fc region, which is further fused to an anti-CD3 scFv. Construct 3 comprises a first chain and a second chain. The first chain comprises, from the N-terminus to the C-terminus, anti-CD2 VL and CL. The second chain comprises, from the N-terminus to the C-terminus, anti-CD2 VH, CH1, CH2, CH3, (G4S)4 linker (SEQ ID NO: 63), anti-CD3 VH, (G4S)4 linker (SEQ ID NO: 63), anti-CD3 VL. Construct 4 comprises an anti-CD28 Fab fused to an Fc region, which is further fused to an anti-CD3 scFv. Construct 4 comprises a first chain and a second chain. The first chain comprises, from the N-terminus to the C-terminus, anti-CD28 VL and CL. The second chain comprises, from the N-terminus to the C-terminus, anti-CD28 VH, CH1, CH2, CH3, (G4S)4 linker (SEQ ID NO: 63), anti-CD3 VH, (G4S)4 linker (SEQ ID NO: 63), anti-CD3 VL.

[0337] Construct 5 comprises an anti-CD2 Fab fused to an anti-CD3 scFv, which is further fused to an Fc region. Construct 5 comprises a first chain and a second chain. The first chain comprises, from the N-terminus to the C-terminus, anti-CD2 VL and CL. The second chain comprises, from the N-terminus to the C-terminus, anti-CD2 VH, CH1, (G4S)2 linker (SEQ ID NO: 5), anti-CD3 VH, (G4S)4 linker (SEQ ID NO: 63), anti-CD3 VL, (G4S)4 linker (SEQ ID NO: 63), CH2, and CH3. Construct 6 comprises an anti-CD28 Fab fused to an anti-CD3 scFv, which is further fused to an Fc region. Construct 6 comprises a first chain and a second chain. The first chain comprises, from the N-terminus to the C-terminus, anti-CD28 VL and CL. The second chain comprises, from the N-terminus to the C-terminus, anti-CD28 VH, CH1, (G4S)2 linker (SEQ ID NO: 5), anti-CD3 VH, (G4S)4 linker (SEQ ID NO: 63), anti-CD3 VL, (G4S)4 linker (SEQ ID NO: 63), CH2, and CH3.

[0338] Construct 7 comprises an anti-CD3 scFv fused to an Fc region, which is further fused to an anti-CD2 Fab. Construct 7 comprises a first chain and a second chain. The first chain comprises, from the N-terminus to the C-terminus, anti-CD2 VL and CL. The second chain comprises, from the N-terminus to the C-terminus, anti-CD3 VH, (G4S)4 linker (SEQ ID NO: 63), anti-CD3 VL, (G4S) linker (SEQ ID NO: 25), CH2, CH3, (G4S)4 linker (SEQ ID NO: 63), anti-CD2 VH, and CH1. Construct 8 comprises an anti-CD3 scFv fused to an Fc region, which is further fused to an anti-CD28 Fab. Construct 8 comprises a first chain and a second chain. The first chain comprises, from the N-terminus to the C-terminus, anti-CD28 VL and CL. The second chain comprises, from the N-terminus to the C-terminus, anti-CD3 VH, (G4S)4 linker (SEQ ID NO: 63), anti-CD3 VL, (G4S) linker (SEQ ID NO: 25), CH2, CH3, (G4S)4 linker (SEQ ID NO: 63), anti-CD28 VH, and CH1.

[0339] Construct 9 comprises an anti-CD2 Fab fused to a first Fc region and an anti-CD3 scFv fused to a second Fc region. Construct 9 comprises a first chain, a second chain, and a third chain. The first chain comprises, from the N-terminus to the C-terminus, anti-CD2 VL and CL. The second chain comprises, from the N-terminus to the C-terminus, anti-CD2 VH, CH1, CH2, and CH3. The third chain comprises, from the N-terminus to the C-terminus, anti-CD3 VH, (G4S)4 linker (SEQ ID NO: 63), anti-CD3 VL, (G4S) linker (SEQ ID NO: 25), CH2, and CH3. Construct 10 comprises an anti-CD28 Fab fused to a first Fc region and an anti-CD3 scFv fused to a second Fc region. Construct 10 comprises a first chain, a second chain, and a third chain. The first chain comprises, from the N-terminus to the C-terminus, anti-CD28 VL and CL. The second chain comprises, from the N-terminus to the C-terminus, anti-CD28 VH, CH1, CH2, and CH3. The third chain comprises, from the N-terminus to the C-terminus, anti-CD3 VH, (G4S)4 linker (SEQ ID NO: 63), anti-CD3 VL, (G4S) linker (SEQ ID NO: 25), CH2, and CH3.

[0340] Construct 11 comprises an anti-CD3 scFv fused to an Fc region. Construct 11 comprises a first chain and a second chain. The first chain comprises, from the N-terminus to the C-terminus, CH2 and CH3. The second chain comprises, from the N-terminus to the C-terminus, anti-CD3 VH, (G4S)4 linker (SEQ ID NO: 63), anti-CD3 VL, (G4S) linker (SEQ ID NO: 25), CH2, and CH3.

[0341] Construct 12 comprises an anti-CD2 Fab fused to a first Fc region and an anti-CD3 scFv fused to a second Fc region. Construct 12 comprises a first chain, a second chain, and a third chain. The first chain comprises, from the N-terminus to the C-terminus, anti-CD2 VL and CL. The second chain comprises, from the N-terminus to the C-terminus, anti-CD2 VH, CH1, CH2, and CH3. The third chain comprises, from the N-terminus to the C-terminus, anti-CD3 VH, (G4S)4 linker (SEQ ID NO: 63), anti-CD3 VL, (G4S) linker (SEQ ID NO: 25), CH2, CH3, (G4S)3 linker (SEQ ID NO: 104), and Matrilin1. Construct 13 comprises an anti-CD28 Fab fused to a first Fc region and an anti-CD3 scFv fused to a second Fc region. Construct 13 comprises a first chain, a second chain, and a third chain. The first chain comprises, from the N-terminus to the C-terminus, anti-CD28 VL and CL. The second chain comprises, from the N-terminus to the C-terminus, anti-CD28 VH, CH1, CH2, and CH3. The third chain comprises, from the N-terminus to the C-terminus, anti-CD3 VH, (G4S)4 linker (SEQ ID NO: 63), anti-CD3 VL, (G4S) linker (SEQ ID NO: 25), CH2, CH3, (G4S)3 linker ((SEQ ID NO: 104), and Matrilinl.

[0342] Construct 14 comprises an anti-CD3 scFv fused to an Fc region. Construct 14 comprises a first chain and a second chain. The first chain comprises, from the N-terminus to the C-terminus, CH2 and CH3. The second chain comprises, from the N-terminus to the C-terminus, anti-CD3 VH, (G4S)4 (SEQ ID NO: 63), linker, anti-CD3 VL, (G4S) linker (SEQ ID NO: 25), CH2, CH3, (G4S)3 linker (SEQ ID NO: 104), and Matrilin1.

[0343] Construct 15 comprises an anti-CD2 Fab fused to a first Fc region and an anti-CD3 scFv fused to a second Fc region. Construct 15 comprises a first chain, a second chain, and a third chain. The first chain comprises, from the N-terminus to the C-terminus, anti-CD2 VL and CL. The second chain comprises, from the N-terminus to the C-terminus, anti-CD2 VH, CH1, CH2, and CH3. The third chain comprises, from the N-terminus to the C-terminus, anti-CD3 VH, (G4S)4 linker (SEQ ID NO: 63), anti-CD3 VL, (G4S) linker (SEQ ID NO: 25), CH2, CH3, (G4S) linker (SEQ ID NO: 25), and the coiled-coil domain of cartilage oligomeric matrix protein (COMPcc). Construct 16 comprises an anti-CD28 Fab fused to a first Fc region and an anti-CD3 scFv fused to a second Fc region. Construct 16 comprises a first chain, a second chain, and a third chain. The first chain comprises, from the N-terminus to the C-terminus, anti-CD28 VL and CL. The second chain comprises, from the N-terminus to the C-terminus, anti-CD28 VH, CH1, CH2, and CH3. The third chain comprises, from the N-terminus to the C-terminus, anti-CD3 VH, (G4S)4 linker (SEQ ID NO: 63), anti-CD3 VL, (G4S) linker (SEQ ID NO: 25), CH2, CH3, (G4S) linker (SEQ ID NO: 25), and COMPcc.

[0344] Construct 17 comprises an anti-CD3 scFv fused to an Fc region. Construct 17 comprises a first chain and a second chain. The first chain comprises, from the N-terminus to the C-terminus, CH2 and CH3. The second chain comprises, from the N-terminus to the C-terminus, anti-CD3 VH, (G4S)4 linker (SEQ ID NO: 63), anti-CD3 VL, (G4S) linker (SEQ ID NO: 25), CH2, CH3, (G4S) linker (SEQ ID NO: 25), and COMPcc.

[0345] FIG. 52 provides images of T cells from brightfield microscopy on day 4, after use of 10 µg/mL of the constructs and positive control. The numbers at the upper left corner of each image refer to the name of the constructs tested. For example, “1” refers to Construct 1, “2” refers to Construct 2, and so on and so forth. “TA” stands for TransAct.

[0346] FIG. 53 shows the results of the IFN gamma and IL-2 readouts from the MSD for each of the 17 constructs and TransAct. The numbers on the x-axis refer to the name of the constructs tested. For example, “1” refers to Construct 1, “2” refers to Construct 2, and so on and so forth. “TA” stands for TransAct.

[0347] FIG. 54 shows percent transduction of an anti-CD19 CAR for each of the 17 constructs and TransAct. The numbers on the x-axis refer to the name of the constructs tested. For example, “1” refers to Construct 1, “2” refers to Construct 2, and so on and so forth. “TA” stands for TransAct.

[0348] FIG. 55 depicts CAR transduction as a function of valency or costimulatory molecule targeted (CD2/CD28). In FIG. 55, F1, F2, F3, F4, F5, and F7 have a ligand valency of 2; F12 and F13 have a ligand valency of 3; and F15 and F16 have a ligand valency of 5. F1, F3, F5, F7, F12, and F15 bind to CD2, whereas F2, F4, F13, and F16 bind to CD28.

[0349] FIGS. 56A-56D show specific killing of tumor cells (calculated by subtracting average % kill in Nalm6 CD19KO cells from average % kill in Nalm6 WT cells) for CAR T-cells generated using Constructs 1 (F1), 3 (F3), 4 (F4), 5 (F5) versus TransAct (“TA”). “H” (in “3 H” and “5 H”) indicates an antibody concentration of 10 µg/mL; “M” (in “1 M,” “3 M,” “4 M,” and “5 M”) indicates an antibody concentration of 1 µg/mL; and “L” (in “1 L,” “3 L,” “4 L,” and “5 L”) indicates an antibody concentration of 0.1 µg/mL.

[0350] FIGS. 57A-B show secreted cytokine levels of CAR T-cells generated using Construct 1 (F1), 3 (F3), 4 (F4), or 5 (F5) or TransAct, when co-cultured with Nalm6 WT cells (“ARM vs. Nalm6 WT”) or Nalm6 CD19 knockout cells (“ARM vs. Nalm6 CD19 KO”).

[0351] FIG. 58 shows the tumor burden as a function of time in the Nalm6 xenograft mouse model treated with CAR transduced or untransduced cells from both donors.

[0352] FIG. 59 shows both CAR+ and CD3+ counts (per 20 µL) from mice treated with CAR transduced or untransduced cells from both donors. These counts were obtained from week 2 blood samples subjected to FACS analysis.

[0353] FIGS. 60A-60D show anti-tumor activity (FIGS. 60A-60B) and in vivo CAR expansion (FIGS. 60C-60D) by donor.

[0354] FIGS. 61A-61B shows the binding information (FIG. 61A) and configuration (FIG. 61B) of second generation stimulatory constructs. “F5 ANTI-CD3 (2)” refers to an F5 construct with an anti-CD3 binder based on ANTI-CD3 (2).

[0355] FIG. 62 shows the transduction efficiency of various stimulatory constructs, including those shown in FIG. 61A. “TA” stands for TransAct. TransAct was used at 0.1% by volume (1 µL for every 1000 µL of culture).

[0356] FIGS. 63A-63B show the binder information (FIG. 63A) and configuration (FIG. 63B) of third generation stimulatory constructs.

[0357] FIG. 64 shows the transduction efficiency of various stimulatory constructs, including those shown in FIG. 63A. “TA” stands for TransAct.

[0358] FIGS. 65A and 65B show specific killing of Nalm6 cells (FIG. 65A) and non-specific killing of FcyR-bearing PL21 cells (FIG. 65B). “F3 Fc-silent” refers to NEG2042 and “F4 Fc-silent” refers to NEG2043 in FIG. 63A.

[0359] FIGS. 66A and 66B. FIG. 66A shows the percentages of T cells expressing an anti-CD19 CAR (“CAR19+”; upper), an anti-BCMA CAR (“BCMA+”; middle), or co-expressing both CARs (“BCMA+CAR19+”; lower) following co-transduction with two vectors. FIG. 66B shows the percentages of T cells expressing an anti-CD22 CAR (“CAR22+”) or co-expressing anti-CD19 CAR and anti-CD22 CAR (“CAR19+22+”) following transduction with a dual CAR-encoding vector, as determined at two different time points post-manufacturing.

### DETAILED DESCRIPTION

### Definitions

[0360] Unless defined otherwise, all technical and scientific terms used herein have the same meaning as commonly understood by one of ordinary skill in the art to which the invention pertains.

[0361] The term “a” and “an” refers to one or to more than one (i.e., to at least one) of the grammatical object of the article. By way of example, “an element” means one element or more than one element.

[0362] The term “about” when referring to a measurable value such as an amount, a temporal duration, and the like, is meant to encompass variations of ±20% or in some instances ±10%, or in some instances ±5%, or in some instances ±1%, or in some instances ±0.1% from the specified value, as such variations are appropriate to perform the disclosed methods.

[0363] The compositions and methods of the present invention encompass polypeptides and nucleic acids having the sequences specified, or sequences substantially identical or similar thereto, for example, sequences at least 85%, 90%, or 95% identical or higher to the sequence specified. In the context of an amino acid sequence, the term “substantially identical” is used herein to refer to a first amino acid sequence that contains a sufficient or minimum number of amino acid residues that are i) identical to, or ii) conservative substitutions of aligned amino acid residues in a second amino acid sequence such that the first and second amino acid sequences can have a common structural domain and/or common functional activity, for example, amino acid sequences that contain a common structural domain having at least about 85%, 90%. 91%, 92%, 93%, 94%, 95%, 96%, 97%, 98% or 99% identity to a reference sequence, for example, a sequence provided herein.

[0364] In the context of a nucleotide sequence, the term “substantially identical” is used herein to refer to a first nucleic acid sequence that contains a sufficient or minimum number of nucleotides that are identical to aligned nucleotides in a second nucleic acid sequence such that the first and second nucleotide sequences encode a polypeptide having common functional activity, or encode a common structural polypeptide domain or a common functional polypeptide activity, for example, nucleotide sequences having at least about 75%, 80%, 85%, 90%, 91%, 92%, 93%, 94%, 95%, 96%, 97%, 98% or 99% identity to a reference sequence, for example, a sequence provided herein.

[0365] The term “variant” refers to a polypeptide that has a substantially identical amino acid sequence to a reference amino acid sequence, or is encoded by a substantially identical nucleotide sequence. In some embodiments, the variant is a functional variant.

[0366] The term “functional variant” refers to a polypeptide that has a substantially identical amino acid sequence to a reference amino acid sequence, or is encoded by a substantially identical nucleotide sequence, and is capable of having one or more activities of the reference amino acid sequence.

[0367] The term cytokine (for example, IL-2, IL-7, IL-15, IL-21, or IL-6) includes full length, a fragment or a variant, for example, a functional variant, of a naturally-occurring cytokine (including fragments and functional variants thereof having at least 10%, 30%, 50%, or 80% of the activity, e.g., the immunomodulatory activity, of the naturally-occurring cytokine). In some embodiments, the cytokine has an amino acid sequence that is substantially identical (e.g., at least about 85%, 90%, 91%, 92%, 93%, 94%, 95%, 96%, 97%, 98% or 99% identity) to a naturally-occurring cytokine, or is encoded by a nucleotide sequence that is substantially identical (e.g., at least about 75%, 80%, 85%, 90%, 91%, 92%, 93%, 94%, 95%, 96%, 97%, 98% or 99% identity) to a naturally-occurring nucleotide sequence encoding a cytokine. In some embodiments, as understood in context, the cytokine further comprises a receptor domain, e.g., a cytokine receptor domain (e.g., an IL-15/IL-15R).

[0368] The term “Chimeric Antigen Receptor” or alternatively a “CAR” refers to a recombinant polypeptide construct comprising at least an extracellular antigen binding domain, a transmembrane domain and a cytoplasmic signaling domain (also referred to herein as “an intracellular signaling domain”) comprising a functional signaling domain derived from a stimulatory molecule as defined below. In some embodiments, the domains in the CAR polypeptide construct are in the same polypeptide chain, for example, comprise a chimeric fusion protein. In some embodiments, the domains in the CAR polypeptide construct are not contiguous with each other, for example, are in different polypeptide chains, for example, as provided in an RCAR as described herein.

[0369] In some embodiments, the cytoplasmic signaling domain comprises a primary signaling domain (for example, a primary signaling domain of CD3-zeta). In some embodiments, the cytoplasmic signaling domain further comprises one or more functional signaling domains derived from at least one costimulatory molecule as defined below. In some embodiments, the costimulatory molecule is chosen from 41BB (i.e., CD137), CD27, ICOS, and/or CD28. In some embodiments, the CAR comprises a chimeric fusion protein comprising an extracellular antigen recognition domain, a transmembrane domain and an intracellular signaling domain comprising a functional signaling domain derived from a stimulatory molecule. In some embodiments, the CAR comprises a chimeric fusion protein comprising an extracellular antigen recognition domain, a transmembrane domain and an intracellular signaling domain comprising a functional signaling domain derived from a costimulatory molecule and a functional signaling domain derived from a stimulatory molecule. In some embodiments, the CAR comprises a chimeric fusion protein comprising an extracellular antigen recognition domain, a transmembrane domain and an intracellular signaling domain comprising two functional signaling domains derived from one or more costimulatory molecule(s) and a functional signaling domain derived from a stimulatory molecule. In some embodiments, the CAR comprises a chimeric fusion protein comprising an extracellular antigen recognition domain, a transmembrane domain and an intracellular signaling domain comprising at least two functional signaling domains derived from one or more costimulatory molecule(s) and a functional signaling domain derived from a stimulatory molecule. In some embodiments the CAR comprises an optional leader sequence at the amino-terminus (N-terminus) of the CAR fusion protein. In some embodiments, the CAR further comprises a leader sequence at the N-terminus of the extracellular antigen recognition domain, wherein the leader sequence is optionally cleaved from the antigen recognition domain (for example, an scFv) during cellular processing and localization of the CAR to the cellular membrane.

[0370] A CAR that comprises an antigen binding domain (for example, an scFv, a single domain antibody, or TCR (for example, a TCR alpha binding domain or TCR beta binding domain)) that targets a specific tumor marker X, wherein X can be a tumor marker as described herein, is also referred to as XCAR. For example, a CAR that comprises an antigen binding domain that targets BCMA is referred to as BCMA CAR. The CAR can be expressed in any cell, for example, an immune effector cell as described herein (for example, a T cell or an NK cell).

[0371] The term “signaling domain” refers to the functional portion of a protein which acts by transmitting information within the cell to regulate cellular activity via defined signaling pathways by generating second messengers or functioning as effectors by responding to such messengers.

[0372] The term “antibody,” as used herein, refers to a protein, or polypeptide sequence derived from an immunoglobulin molecule, which specifically binds with an antigen. Antibodies can be polyclonal or monoclonal, multiple or single chain, or intact immunoglobulins, and may be derived from natural sources or from recombinant sources. Antibodies can be tetramers of immunoglobulin molecules.

[0373] The term “antibody fragment” refers to at least one portion of an intact antibody, or recombinant variants thereof, and refers to the antigen binding domain, for example, an antigenic determining variable region of an intact antibody, that is sufficient to confer recognition and specific binding of the antibody fragment to a target, such as an antigen. Examples of antibody fragments include, but are not limited to, Fab, Fab′, F(ab′)2, and Fv fragments, scFv antibody fragments, linear antibodies, single domain antibodies such as sdAb (either VL or VH), camelid VHH domains, and multi-specific molecules formed from antibody fragments such as a bivalent fragment comprising two or more, for example, two, Fab fragments linked by a disulfide bridge at the hinge region, or two or more, for example, two isolated CDR or other epitope binding fragments of an antibody linked. An antibody fragment can also be incorporated into single domain antibodies, maxibodies, minibodies, nanobodies, intrabodies, diabodies, triabodies, tetrabodies, v-NAR and bis-scFv (see, for example, Hollinger and Hudson, Nature Biotechnology 23:1126-1136, 2005). Antibody fragments can also be grafted into scaffolds based on polypeptides such as a fibronectin type III (Fn3) (see U.S. Pat. No.: 6,703,199, which describes fibronectin polypeptide minibodies).

[0374] The term “scFv” refers to a fusion protein comprising at least one antibody fragment comprising a variable region of a light chain and at least one antibody fragment comprising a variable region of a heavy chain, wherein the light and heavy chain variable regions are contiguously linked via a short flexible polypeptide linker, and capable of being expressed as a single chain polypeptide, and wherein the scFv retains the specificity of the intact antibody from which it is derived. Unless specified, as used herein an scFv may have the VL and VH variable regions in either order, for example, with respect to the N-terminal and C-terminal ends of the polypeptide, the scFv may comprise VL-linker-VH or may comprise VH-linker-VL. In some embodiments, the scFv may comprise the structure of NH₂-V_{L}-linker-V_{H}-COOH or NH₂-V_{H}-linker-V_{L}-COOH.

[0375] The terms “complementarity determining region” or “CDR,” as used herein, refer to the sequences of amino acids within antibody variable regions which confer antigen specificity and binding affinity. For example, in general, there are three CDRs in each heavy chain variable region (for example, HCDR1, HCDR2, and HCDR3) and three CDRs in each light chain variable region (LCDR1, LCDR2, and LCDR3). The precise amino acid sequence boundaries of a given CDR can be determined using any of a number of well-known schemes, including those described by Kabat et al. (1991), “Sequences of Proteins of Immunological Interest,” 5th Ed. Public Health Service, National Institutes of Health, Bethesda, MD (“Kabat” numbering scheme), Al-Lazikani et al., (1997) JMB 273,927-948 (“Chothia” numbering scheme), or a combination thereof. In a combined Kabat and Chothia numbering scheme, in some embodiments, the CDRs correspond to the amino acid residues that are part of a Kabat CDR, a Chothia CDR, or both.

[0376] The portion of the CAR composition of the invention comprising an antibody or antibody fragment thereof may exist in a variety of forms, for example, where the antigen binding domain is expressed as part of a polypeptide chain including, for example, a single domain antibody fragment (sdAb), a single chain antibody (scFv), or for example, a human or humanized antibody (Harlow et al., 1999, In: Using Antibodies: A Laboratory Manual, Cold Spring Harbor Laboratory Press, NY; Harlow et al., 1989, In: Antibodies: A Laboratory Manual, Cold Spring Harbor, New York; Houston et al., 1988, Proc. Natl. Acad. Sci. USA 85:5879-5883; Bird et al., 1988, Science 242:423-426). In some embodiments, the antigen binding domain of a CAR composition of the invention comprises an antibody fragment. In some embodiments, the CAR comprises an antibody fragment that comprises an scFv.

[0377] As used herein, the term “binding domain” or “antibody molecule” (also referred to herein as “anti-target binding domain”) refers to a protein, for example, an immunoglobulin chain or fragment thereof, comprising at least one immunoglobulin variable domain sequence. The term “binding domain” or “antibody molecule” encompasses antibodies and antibody fragments. In some embodiments, an antibody molecule is a multispecific antibody molecule, for example, it comprises a plurality of immunoglobulin variable domain sequences, wherein a first immunoglobulin variable domain sequence of the plurality has binding specificity for a first epitope and a second immunoglobulin variable domain sequence of the plurality has binding specificity for a second epitope. In some embodiments, a multispecific antibody molecule is a bispecific antibody molecule. A bispecific antibody has specificity for no more than two antigens. A bispecific antibody molecule is characterized by a first immunoglobulin variable domain sequence which has binding specificity for a first epitope and a second immunoglobulin variable domain sequence that has binding specificity for a second epitope.

[0378] The terms “bispecific antibody” and “bispecific antibodies” refer to molecules that combine the antigen binding sites of two antibodies within a single molecule. Thus, a bispecific antibody is able to bind two different antigens simultaneously or sequentially. Methods for making bispecific antibodies are well known in the art. Various formats for combining two antibodies are also known in the art. Forms of bispecific antibodies of the invention include, but are not limited to, a diabody, a single-chain diabody, Fab dimerization (Fab-Fab), Fab-scFv, and a tandem antibody, as known to those of skill in the art.

[0379] The term “antibody heavy chain,” refers to the larger of the two types of polypeptide chains present in antibody molecules in their naturally occurring conformations, and which normally determines the class to which the antibody belongs.

[0380] The term “antibody light chain,” refers to the smaller of the two types of polypeptide chains present in antibody molecules in their naturally occurring conformations. Kappa (κ) and lambda (λ) light chains refer to the two major antibody light chain isotypes.

[0381] The term “recombinant antibody” refers to an antibody which is generated using recombinant DNA technology, such as, for example, an antibody expressed by a bacteriophage or yeast expression system. The term should also be construed to mean an antibody which has been generated by the synthesis of a DNA molecule encoding the antibody and which DNA molecule expresses an antibody protein, or an amino acid sequence specifying the antibody, wherein the DNA or amino acid sequence has been obtained using recombinant DNA or amino acid sequence technology which is available and well known in the art.

[0382] The term “antigen” or “Ag” refers to a molecule that provokes an immune response. This immune response may involve either antibody production, or the activation of specific immunologically-competent cells, or both. The skilled artisan will understand that any macromolecule, including virtually all proteins or peptides, can serve as an antigen. Furthermore, antigens can be derived from recombinant or genomic DNA. A skilled artisan will understand that any DNA, which comprises a nucleotide sequences or a partial nucleotide sequence encoding a protein that elicits an immune response therefore encodes an “antigen” as that term is used herein. Furthermore, one skilled in the art will understand that an antigen need not be encoded solely by a full length nucleotide sequence of a gene. It is readily apparent that the present invention includes, but is not limited to, the use of partial nucleotide sequences of more than one gene and that these nucleotide sequences are arranged in various combinations to encode polypeptides that elicit the desired immune response. Moreover, a skilled artisan will understand that an antigen need not be encoded by a “gene” at all. It is readily apparent that an antigen can be generated synthesized or can be derived from a biological sample, or might be macromolecule besides a polypeptide. Such a biological sample can include, but is not limited to a tissue sample, a tumor sample, a cell or a fluid with other biological components.

[0383] The term “multispecific binding molecule” refers to a molecule that specifically binds to at least two antigens and comprise two or more antigen-binding domains. The antigen-binding domains can each independently be an antibody fragment (e.g., scFv, Fab, nanobody), a ligand, or a non-antibody derived binder (e.g., fibronectin, Fynomer, DARPin).

[0384] The term “monovalent” as used herein in the context of a multispecific binding molecule, antibody (e.g., bispecific antibody), or antibody fragment refers to a multispecific binding molecule, antibody (e.g., bispecific antibody), or antibody fragment in which there is a single antigen binding domain for each antigen to which the multispecific binding molecule, antibody (e.g., bispecific antibody), or antibody fragment binds.

[0385] The term “bivalent” as used herein in the context of a multispecific binding molecule, antibody (e.g., bispecific antibody), or antibody fragment refers to a multispecific binding molecule, antibody (e.g., bispecific antibody), or antibody fragment in which there are two antigen binding domains for each antigen to which the multispecific binding molecule, antibody (e.g., bispecific antibody), or antibody fragment binds.

[0386] The term “multimer” refers to an aggregate of a plurality of molecules (such as but not limited to antibodies (e.g. bispecific antibodies)), optionally conjugated to one another.

[0387] The term “conjugated to” refers to one or more molecules covalently or non-covalently bound together, optionally, directly or via linker.

[0388] The term “Fc silent” refers to an Fc domain that has been modified to have minimal interaction with effector cells. Silenced effector functions may be obtained by mutation in the Fc region of the antibodies and have been described in the art, such as, but not limited to, LALA and N297A (Strohl, W., 2009, Curr. Opin. Biotechnol. vol. 20(6):685-691); and D265A (Baudino et al., 2008, J. Immunol. 181: 6664- 69) see also Heusser et al., WO2012065950. Examples of Fc silencing mutations include the LALA mutant comprising L234A and L235A mutation in the IgG1 Fc amino acid sequence, DAPA (D265A, P329A) (see, e.g., US 6,737,056), N297A, DANAPA (D265A, N297A, and P329A), and/or LALADANAPS (L234A, L235A, D265A, N297A and P331S).

[0389] The term “CD3/TCR complex” refers to a complex on the T-cell surface comprising a TCR including a TCR alpha and TCR beta chain; CD3 including one CD3 gamma chain, one CD3 delta chain, and two CD3 epsilon chains; and a zeta domain. UniProt accession numbers P01848 (TCR alpha, constant domain), P01850 (TCR beta, constant domain 1), A0A5B9 (TCR beta, constant domain P04234 (CD3 delta), P07766 (CD3 epsilon) provide exemplary human sequences for these chains, with the exception of the zeta chain, responsible for intracellular signaling, which is discussed in further detail below. Further relevant accession numbers include A0A075B662 (murine TCR alpha, constant domain), A0A0A6YWV4 and/or A0A075B5J3 (murine TCR beta, constant domain 1), A0A075B5J4 (murine TCR beta, constant domain 2), P11942 (murine CD3 gamma), P04235 (murine CD3 delta), P22646 (murine CD3 epsilon).

[0390] The term “CD28” refers to a T-cell specific glycoprotein CD28, also referred to as Tp44, as well as all alternate names thereof, which functions as a costimulatory molecule. UniProt accession number P10747 provides exemplary human CD28 amino acid sequences (see also HGNC: 1653, Entrez Gene: 940, Ensembl: ENSG00000178562, and OMIM: 186760). Further relevant CD28 sequences include UniProt accession number P21041 (murine CD28).

[0391] The term “ICOS” refers to inducible T-cell costimulator, also referred to as AILIM, CVID1, CD278, as well as all alternate names thereof, which functions as a costimulatory molecule. UniProt accession number Q9Y6W8 provides exemplary human ICOS amino acid sequences (see also HGNC: 5351, Entrez Gene: 29851, Ensembl: ENSG00000163600, and OMIM: 604558). Further relevant ICOS sequences include UniProt accession number Q9WVS0 (murine ICOS).

[0392] The term “CD27” refers to T-cell activation antigen CD27, Tumor necrosis factor receptor superfamily member 7, T14, T-cell activation antigen S152, Tp55, as well as alternate names thereof, which functions as a costimulatory molecule. UniProt accession number P26842 provides exemplary human CD27 amino acid sequences (see also HGNC: 11922, Entrez Gene: 939, Ensembl: ENSG00000139193, and OMIM: 186711). Further relevant CD27 sequences include UniProt accession number P41272 (murine CD27).

[0393] The term “CD25” refers to IL-2 subunit alpha, TAC antigen, p55, insulin dependent diabetes mellitus 10, IMD21, P55, TCGFR, as well as alternate names thereof, which functions as a growth factor receptor. UniProt accession number P01589 provides exemplary human CD25 amino acid sequences (see also HGNC: 6008, Entrez Gene: 3559, Ensembl: ENSG00000134460, and OMIM: 147730). Further relevant CD25 sequences include UniProt accession number P01590 (murine CD25).

[0394] The term “4-1BB” refers to CD137 or Tumor necrosis factor receptor superfamily member 9, as well as alternate names thereof, which functions as a costimulatory molecule. UniProt accession number Q07011 provides exemplary human 4-1BB amino acid sequences (see also HGNC: 11924, Entrez Gene: 3604, Ensembl: ENSG00000049249, and OMIM: 602250). Further relevant 4-1BB sequences include UniProt accession number P20334 (murine 4-1BB).

[0395] The term “IL6RA” refers to IL-6 receptor subunit alpha or CD126, as well as alternate names thereof, which functions as a growth factor receptor. UniProt accession number P08887 provides exemplary human IL6RA amino acid sequences (see also HGNC: 6019, Entrez Gene: 3570, Ensembl: ENSG00000160712, and OMIM: 147880 Further relevant IL6RA sequences include UniProt accession number P22272 (murine IL6RA).

[0396] The term “IL6RB” refers to IL-6 receptor subunit beta or CD130, as well as alternate names thereof, which functions as a growth factor receptor. UniProt accession number P40189 provides exemplary human IL6RB amino acid sequences. Further relevant IL6RB sequences include UniProt accession number Q00560 (murine IL6RB).

[0397] The term “CD2” refers to T-cell surface antigen T11/Leu-5/CD2, lymphocyte function antigen 2, T11, or erythrocyte/rosette/LFA-3 receptor, as well as alternate names thereof, which functions as a growth factor receptor. UniProt accession number P06729 provides exemplary human CD2 amino acid sequences (see also HGNC: 1639, Entrez Gene: 914, Ensembl: ENSG00000116824, and OMIM: 186990). Further relevant CD2 sequences include UniProt accession number P08920 (murine CD2).

[0398] The terms “anti-tumor effect” and “anti-cancer effect” are used interchangeably and refer to a biological effect which can be manifested by various means, including but not limited to, for example, a decrease in tumor volume or cancer volume, a decrease in the number of tumor cells or cancer cells, a decrease in the number of metastases, an increase in life expectancy, a decrease in tumor cell proliferation or cancer cell proliferation, a decrease in tumor cell survival or cancer cell survival, or amelioration of various physiological symptoms associated with the cancerous condition. An “anti-tumor effect” or “anti-cancer effect” can also be manifested by the ability of the peptides, polynucleotides, cells and antibodies of the invention in prevention of the occurrence of tumor or cancer in the first place.

[0399] The term “autologous” refers to any material derived from the same individual to whom it is later to be re-introduced into the individual.

[0400] The term “allogeneic” refers to any material derived from a different animal of the same species as the individual to whom the material is introduced. Two or more individuals are said to be allogeneic to one another when the genes at one or more loci are not identical. In some embodiments, allogeneic material from individuals of the same species may be sufficiently unlike genetically to interact antigenically.

[0401] The term “xenogeneic” refers to a graft derived from an animal of a different species.

[0402] The term “apheresis” as used herein refers to the art-recognized extracorporeal process by which the blood of a donor or patient is removed from the donor or patient and passed through an apparatus that separates out selected particular constituent(s) and returns the remainder to the circulation of the donor or patient, for example, by retransfusion. Thus, in the context of “an apheresis sample” refers to a sample obtained using apheresis.

[0403] The term “cancer” refers to a disease characterized by the rapid and uncontrolled growth of aberrant cells. Cancer cells can spread locally or through the bloodstream and lymphatic system to other parts of the body. Examples of various cancers are described herein and include but are not limited to, breast cancer, prostate cancer, ovarian cancer, cervical cancer, skin cancer, pancreatic cancer, colorectal cancer, renal cancer, liver cancer, brain cancer, lymphoma, leukemia, lung cancer and the like. In some embodiments cancers treated by the methods described herein include multiple myeloma, Hodgkin’s lymphoma or non-Hodgkin’s lymphoma.

[0404] The terms “tumor” and “cancer” are used interchangeably herein, for example, both terms encompass solid and liquid, for example, diffuse or circulating, tumors. As used herein, the term “cancer” or “tumor” includes premalignant, as well as malignant cancers and tumors.

[0405] “Derived from” as that term is used herein, indicates a relationship between a first and a second molecule. It generally refers to structural similarity between the first molecule and a second molecule and does not connotate or include a process or source limitation on a first molecule that is derived from a second molecule. For example, in the case of an intracellular signaling domain that is derived from a CD3zeta molecule, the intracellular signaling domain retains sufficient CD3zeta structure such that is has the required function, namely, the ability to generate a signal under the appropriate conditions. It does not connotate or include a limitation to a particular process of producing the intracellular signaling domain, for example, it does not mean that, to provide the intracellular signaling domain, one must start with a CD3zeta sequence and delete unwanted sequence, or impose mutations, to arrive at the intracellular signaling domain.

[0406] The term “conservative sequence modifications” refers to amino acid modifications that do not significantly affect or alter the binding characteristics of the antibody or antibody fragment containing the amino acid sequence. Such conservative modifications include amino acid substitutions, additions and deletions. Modifications can be introduced into an antibody or antibody fragment of the invention by standard techniques known in the art, such as site-directed mutagenesis and PCR-mediated mutagenesis. Conservative substitutions are ones in which the amino acid residue is replaced with an amino acid residue having a similar side chain. Families of amino acid residues having similar side chains have been defined in the art. These families include amino acids with basic side chains (for example, lysine, arginine, histidine), acidic side chains (for example, aspartic acid, glutamic acid), uncharged polar side chains (for example, glycine, asparagine, glutamine, serine, threonine, tyrosine, cysteine, tryptophan), nonpolar side chains (for example, alanine, valine, leucine, isoleucine, proline, phenylalanine, methionine), beta-branched side chains (for example, threonine, valine, isoleucine) and aromatic side chains (for example, tyrosine, phenylalanine, tryptophan, histidine). Thus, one or more amino acid residues within a CAR of the invention can be replaced with other amino acid residues from the same side chain family and the altered CAR can be tested using the functional assays described herein.

[0407] The term “stimulation” in the context of stimulation by a stimulatory and/or costimulatory molecule refers to a response, for example, a primary or secondary response, induced by binding of a stimulatory molecule (for example, a TCR/CD3 complex) and/or a costimulatory molecule (for example, CD28 or 4-1BB) with its cognate ligand thereby mediating a signal transduction event, such as, but not limited to, signal transduction via the TCR/CD3 complex. Stimulation can mediate altered expression of certain molecules and/or reorganization of cytoskeletal structures, and the like.

[0408] The term “stimulatory molecule,” refers to a molecule expressed by a T cell that provides the primary cytoplasmic signaling sequence(s) that regulate primary activation of the TCR complex in a stimulatory way for at least some aspect of the T cell signaling pathway. In some embodiments, the ITAM-containing domain within the CAR recapitulates the signaling of the primary TCR independently of endogenous TCR complexes. In some embodiments, the primary signal is initiated by, for instance, binding of a TCR/CD3 complex with an MHC molecule loaded with peptide, and which leads to mediation of a T cell response, including, but not limited to, proliferation, activation, differentiation, and the like. A primary cytoplasmic signaling sequence (also referred to as a “primary signaling domain”) that acts in a stimulatory manner may contain a signaling motif which is known as immunoreceptor tyrosine-based activation motif or ITAM. Examples of an ITAM containing primary cytoplasmic signaling sequence that is of particular use in the invention includes, but is not limited to, those derived from TCR zeta, FcR gamma, FcR beta, CD3 gamma, CD3 delta, CD3 epsilon, CD5, CD22, CD79a, CD79b, CD278 (also known as “ICOS”), FcεRI and CD66d, DAP10 and DAP12. In a specific CAR of the invention, the intracellular signaling domain in any one or more CARS of the invention comprises an intracellular signaling sequence, for example, a primary signaling sequence of CD3-zeta. The term “antigen presenting cell” or “APC” refers to an immune system cell such as an accessory cell (for example, a B-cell, a dendritic cell, and the like) that displays a foreign antigen complexed with major histocompatibility complexes (MHC’s) on its surface. T-cells may recognize these complexes using their T-cell receptors (TCRs). APCs process antigens and present them to T-cells.

[0409] An “intracellular signaling domain,” as the term is used herein, refers to an intracellular portion of a molecule. In embodiments, the intracellular signal domain transduces the effector function signal and directs the cell to perform a specialized function. While the entire intracellular signaling domain can be employed, in many cases it is not necessary to use the entire chain. To the extent that a truncated portion of the intracellular signaling domain is used, such truncated portion may be used in place of the intact chain as long as it transduces the effector function signal. The term intracellular signaling domain is thus meant to include any truncated portion of the intracellular signaling domain sufficient to transduce the effector function signal.

[0410] The intracellular signaling domain generates a signal that promotes an immune effector function of the CAR containing cell, for example, a CART cell. Examples of immune effector function, for example, in a CART cell, include cytolytic activity and helper activity, including the secretion of cytokines.

[0411] In some embodiments, the intracellular signaling domain can comprise a primary intracellular signaling domain. Exemplary primary intracellular signaling domains include those derived from the molecules responsible for primary stimulation, or antigen dependent simulation. In some embodiments, the intracellular signaling domain can comprise a costimulatory intracellular domain. Exemplary costimulatory intracellular signaling domains include those derived from molecules responsible for costimulatory signals, or antigen independent stimulation. For example, in the case of a CART, a primary intracellular signaling domain can comprise a cytoplasmic sequence of a T cell receptor, and a costimulatory intracellular signaling domain can comprise cytoplasmic sequence from co-receptor or costimulatory molecule.

[0412] A primary intracellular signaling domain can comprise a signaling motif which is known as an immunoreceptor tyrosine-based activation motif or ITAM. Examples of ITAM containing primary cytoplasmic signaling sequences include, but are not limited to, those derived from CD3 zeta, FcR gamma, FcR beta, CD3 gamma, CD3 delta, CD3 epsilon, CD5, CD22, CD79a, CD79b, CD278 (also known as “ICOS”), FcεRI, CD66d, DAP10 and DAP12.

[0413] The term “zeta” or alternatively “zeta chain”, “CD3-zeta” or “TCR-zeta” refers to CD247. Swiss-Prot accession number P20963 provides exemplary human CD3 zeta amino acid sequences. A “zeta stimulatory domain” or alternatively a “CD3-zeta stimulatory domain” or a “TCR-zeta stimulatory domain” refers to a stimulatory domain of CD3-zeta or a variant thereof (for example, a molecule having mutations, for example, point mutations, fragments, insertions, or deletions). In some embodiments, the cytoplasmic domain of zeta comprises residues 52 through 164 of GenBank Acc. No. BAG36664.1 or a variant thereof (for example, a molecule having mutations, for example, point mutations, fragments, insertions, or deletions). In some embodiments, the “zeta stimulatory domain” or a “CD3-zeta stimulatory domain” is the sequence provided as SEQ ID NO: 9 or 10, or a variant thereof (for example, a molecule having mutations, for example, point mutations, fragments, insertions, or deletions).

[0414] The term “costimulatory molecule” refers to the cognate binding partner on a T cell that specifically binds with a costimulatory ligand, thereby mediating a costimulatory response by the T cell, such as, but not limited to, proliferation. Costimulatory molecules are cell surface molecules other than antigen receptors or their ligands that are required for an efficient immune response. Costimulatory molecules include, but are not limited to an MHC class I molecule, TNF receptor proteins, Immunoglobulin-like proteins, cytokine receptors, integrins, signaling lymphocytic activation molecules (SLAM proteins), activating NK cell receptors, BTLA, Toll ligand receptor, OX40, CD2, CD7, CD27, CD28, CD30, CD40, CDS, ICAM-1, LFA-1 (CD11a/CD18), 4-1BB (CD137), B7-H3, CDS, ICAM-1, ICOS (CD278), GITR, BAFFR, LIGHT, HVEM (LIGHTR), KIRDS2, SLAMF7, NKp80 (KLRF1), NKp44, NKp30, NKp46, CD19, CD4, CD8alpha, CD8beta, IL2R beta, IL2R gamma, IL7R alpha, ITGA4, VLA1, CD49a, ITGA4, IA4, CD49D, ITGA6, VLA-6, CD49f, ITGAD, CD11d, ITGAE, CD103, ITGAL, CD11a, LFA-1, ITGAM, CD11b, ITGAX, CD11c, ITGB1, CD29, ITGB2, CD18, LFA-1, ITGB7, NKG2D, NKG2C, TNFR2, TRANCE/RANKL, DNAM1 (CD226), SLAMF4 (CD244, 2B4), CD84, CD96 (Tactile), CEACAM1, CRTAM, Ly9 (CD229), CD160 (BY55), PSGL1, CD100 (SEMA4D), CD69, SLAMF6 (NTB-A, Ly108), SLAM (SLAMF1, CD150, IPO-3), BLAME (SLAMF8), SELPLG (CD162), LTBR, LAT, GADS, SLP-76, PAG/Cbp, CD19a, CD28-OX40, CD28-4-1BB, and a ligand that specifically binds with CD83.

[0415] A costimulatory intracellular signaling domain refers to the intracellular portion of a costimulatory molecule.

[0416] The intracellular signaling domain can comprise the entire intracellular portion, or the entire native intracellular signaling domain, of the molecule from which it is derived, or a functional fragment thereof.

[0417] A “4-1BB costimulatory domain” refers to a costimulatory domain of 4-1BB, or a variant thereof (for example, a molecule having mutations, for example, point mutations, fragments, insertions, or deletions). In some embodiments, the “4-1BB costimulatory domain” is the sequence provided as SEQ ID NO: 7 or a variant thereof (for example, a molecule having mutations, for example, point mutations, fragments, insertions, or deletions).

[0418] “Immune effector cell,” as that term is used herein, refers to a cell that is involved in an immune response, for example, in the promotion of an immune effector response. Examples of immune effector cells include T cells, for example, alpha/beta T cells and gamma/delta T cells, B cells, natural killer (NK) cells, natural killer T (NKT) cells, mast cells, and myeloic-derived phagocytes.

[0419] “Immune effector function or immune effector response,” as that term is used herein, refers to function or response, for example, of an immune effector cell, that enhances or promotes an immune attack of a target cell. For example, an immune effector function or response refers a property of a T or NK cell that promotes killing or the inhibition of growth or proliferation, of a target cell. In the case of a T cell, primary stimulation and costimulation are examples of immune effector function or response.

[0420] The term “effector function” refers to a specialized function of a cell. Effector function of a T cell, for example, may be cytolytic activity or helper activity including the secretion of cytokines.

[0421] The term “encoding” refers to the inherent property of specific sequences of nucleotides in a polynucleotide, such as a gene, a cDNA, or an mRNA, to serve as templates for synthesis of other polymers and macromolecules in biological processes having either a defined sequence of nucleotides (for example, rRNA, tRNA and mRNA) or a defined sequence of amino acids and the biological properties resulting therefrom. Thus, a gene, cDNA, or RNA, encodes a protein if transcription and translation of mRNA corresponding to that gene produces the protein in a cell or other biological system. Both the coding strand, the nucleotide sequence of which is identical to the mRNA sequence and is usually provided in sequence listings, and the non-coding strand, used as the template for transcription of a gene or cDNA, can be referred to as encoding the protein or other product of that gene or cDNA.

[0422] Unless otherwise specified, a “nucleotide sequence encoding an amino acid sequence” includes all nucleotide sequences that are degenerate versions of each other and that encode the same amino acid sequence. The phrase nucleotide sequence that encodes a protein or a RNA may also include introns to the extent that the nucleotide sequence encoding the protein may in some version contain an intron(s).

[0423] The term “effective amount” or “therapeutically effective amount” are used interchangeably herein, and refer to an amount of a compound, formulation, material, or composition, as described herein effective to achieve a particular biological result.

[0424] The term “endogenous” refers to any material from or produced inside an organism, cell, tissue or system.

[0425] The term “exogenous” refers to any material introduced from or produced outside an organism, cell, tissue or system.

[0426] The term “expression” refers to the transcription and/or translation of a particular nucleotide sequence. In some embodiments, expression comprises translation of an mRNA introduced into a cell.

[0427] The term “transfer vector” refers to a composition of matter which comprises an isolated nucleic acid and which can be used to deliver the isolated nucleic acid to the interior of a cell. Numerous vectors are known in the art including, but not limited to, linear polynucleotides, polynucleotides associated with ionic or amphiphilic compounds, plasmids, and viruses. Thus, the term “transfer vector” includes an autonomously replicating plasmid or a virus. The term should also be construed to further include non-plasmid and non-viral compounds which facilitate transfer of nucleic acid into cells, such as, for example, a polylysine compound, liposome, and the like. Examples of viral transfer vectors include, but are not limited to, adenoviral vectors, adeno-associated virus vectors, retroviral vectors, lentiviral vectors, and the like.

[0428] The term “expression vector” refers to a vector comprising a recombinant polynucleotide comprising expression control sequences operatively linked to a nucleotide sequence to be expressed. An expression vector comprises sufficient cis-acting elements for expression; other elements for expression can be supplied by the host cell or in an in vitro expression system. Expression vectors include all those known in the art, including cosmids, plasmids (for example, naked or contained in liposomes) and viruses (for example, lentiviruses, retroviruses, adenoviruses, and adeno-associated viruses) that incorporate the recombinant polynucleotide.

[0429] The term “lentivirus” refers to a genus of the Retroviridae family. Lentiviruses are unique among the retroviruses in being able to infect non-dividing cells; they can deliver a significant amount of genetic information into the DNA of the host cell, so they are one of the most efficient methods of a gene delivery vector. HIV, SIV, and FIV are all examples of lentiviruses.

[0430] The term “lentiviral vector” refers to a vector derived from at least a portion of a lentivirus genome, including especially a self-inactivating lentiviral vector as provided in Milone et al., Mol. Ther. 17(8): 1453-1464 (2009). Other examples of lentivirus vectors that may be used in the clinic, include but are not limited to, for example, the LENTIVECTOR® gene delivery technology from Oxford BioMedica, the LENTIMAX™ vector system from Lentigen and the like. Nonclinical types of lentiviral vectors are also available and would be known to one skilled in the art.

[0431] The term “homologous” or “identity” refers to the subunit sequence identity between two polymeric molecules, for example, between two nucleic acid molecules, such as, two DNA molecules or two RNA molecules, or between two polypeptide molecules. When a subunit position in both of the two molecules is occupied by the same monomeric subunit; for example, if a position in each of two DNA molecules is occupied by adenine, then they are homologous or identical at that position. The homology between two sequences is a direct function of the number of matching or homologous positions; for example, if half (for example, five positions in a polymer ten subunits in length) of the positions in two sequences are homologous, the two sequences are 50% homologous; if 90% of the positions (for example, 9 of 10), are matched or homologous, the two sequences are 90% homologous.

[0432] “Humanized” forms of non-human (for example, murine) antibodies are chimeric immunoglobulins, immunoglobulin chains or fragments thereof (such as Fv, Fab, Fab′, F(ab′)2 or other antigen-binding subsequences of antibodies) which contain minimal sequence derived from non-human immunoglobulin. For the most part, humanized antibodies and antibody fragments thereof are human immunoglobulins (recipient antibody or antibody fragment) in which residues from a complementary-determining region (CDR) of the recipient are replaced by residues from a CDR of a non-human species (donor antibody) such as mouse, rat or rabbit having the desired specificity, affinity, and capacity. In some instances, Fv framework region (FR) residues of the human immunoglobulin are replaced by corresponding non-human residues. Furthermore, a humanized antibody/antibody fragment can comprise residues which are found neither in the recipient antibody nor in the imported CDR or framework sequences. These modifications can further refine and optimize antibody or antibody fragment performance. In general, the humanized antibody or antibody fragment thereof will comprise substantially all of at least one, and typically two, variable domains, in which all or substantially all of the CDR regions correspond to those of a non-human immunoglobulin and all or a significant portion of the FR regions are those of a human immunoglobulin sequence. The humanized antibody or antibody fragment can also comprise at least a portion of an immunoglobulin constant region (Fc), typically that of a human immunoglobulin. For further details, see Jones et al., Nature, 321: 522-525, 1986; Reichmann et al., Nature, 332: 323-329, 1988; Presta, Curr. Op. Struct. Biol., 2: 593-596, 1992.

[0433] “Fully human” refers to an immunoglobulin, such as an antibody or antibody fragment, where the whole molecule is of human origin or consists of an amino acid sequence identical to a human form of the antibody or immunoglobulin.

[0434] The term “isolated” means altered or removed from the natural state. For example, a nucleic acid or a peptide naturally present in a living animal is not “isolated,” but the same nucleic acid or peptide partially or completely separated from the coexisting materials of its natural state is “isolated.” An isolated nucleic acid or protein can exist in substantially purified form, or can exist in a non-native environment such as, for example, a host cell.

[0435] In the context of the present invention, the following abbreviations for the commonly occurring nucleic acid bases are used. “A” refers to adenosine, “C” refers to cytosine, “G” refers to guanosine, “T” refers to thymidine, and “U” refers to uridine.

[0436] The term “operably linked” or “transcriptional control” refers to functional linkage between a regulatory sequence and a heterologous nucleic acid sequence resulting in expression of the latter. For example, a first nucleic acid sequence is operably linked with a second nucleic acid sequence when the first nucleic acid sequence is placed in a functional relationship with the second nucleic acid sequence. For instance, a promoter is operably linked to a coding sequence if the promoter affects the transcription or expression of the coding sequence. Operably linked DNA sequences can be contiguous with each other and, for example, where necessary to join two protein coding regions, are in the same reading frame.

[0437] The term “parenteral” administration of an immunogenic composition includes, for example, subcutaneous (s.c.), intravenous (i.v.), intramuscular (i.m.), or intrasternal injection, intratumoral, or infusion techniques.

[0438] The term “nucleic acid,” “nucleic acid molecule,” “polynucleotide,” or “polynucleotide molecule” refers to deoxyribonucleic acids (DNA) or ribonucleic acids (RNA) and polymers thereof in either single- or double-stranded form. Unless specifically limited, the term encompasses nucleic acids containing known analogues of natural nucleotides that have similar binding properties as the reference nucleic acid and are metabolized in a manner similar to naturally occurring nucleotides. In some embodiments, a “nucleic acid,” “nucleic acid molecule,” “polynucleotide,” or “polynucleotide molecule” comprise a nucleotide/nucleoside derivative or analog. Unless otherwise indicated, a particular nucleic acid sequence also implicitly encompasses conservatively modified variants thereof (for example, degenerate codon substitutions, for example, conservative substitutions), alleles, orthologs, SNPs, and complementary sequences as well as the sequence explicitly indicated. Specifically, degenerate codon substitutions, for example, conservative substitutions may be achieved by generating sequences in which the third position of one or more selected (or all) codons is substituted with mixed-base and/or deoxyinosine residues (Batzer et al., Nucleic Acid Res. 19:5081 (1991); Ohtsuka et al., J. Biol. Chem. 260:2605-2608 (1985); and Rossolini et al., Mol. Cell. Probes 8:91-98 (1994)).

[0439] The terms “peptide,” “polypeptide,” and “protein” are used interchangeably, and refer to a compound comprised of amino acid residues covalently linked by peptide bonds. A protein or peptide must contain at least two amino acids, and no limitation is placed on the maximum number of amino acids that can comprise a protein’s or peptide’s sequence. Polypeptides include any peptide or protein comprising two or more amino acids joined to each other by peptide bonds. As used herein, the term refers to both short chains, which also commonly are referred to in the art as peptides, oligopeptides and oligomers, for example, and to longer chains, which generally are referred to in the art as proteins, of which there are many types. “Polypeptides” include, for example, biologically active fragments, substantially homologous polypeptides, oligopeptides, homodimers, heterodimers, variants of polypeptides, modified polypeptides, derivatives, analogs, fusion proteins, among others. A polypeptide includes a natural peptide, a recombinant peptide, or a combination thereof.

[0440] The term “promoter” refers to a DNA sequence recognized by the synthetic machinery of the cell, or introduced synthetic machinery, required to initiate the specific transcription of a polynucleotide sequence.

[0441] The term “promoter/regulatory sequence” refers to a nucleic acid sequence which is required for expression of a gene product operably linked to the promoter/regulatory sequence. In some instances, this sequence may be the core promoter sequence and in other instances, this sequence may also include an enhancer sequence and other regulatory elements which are required for expression of the gene product. The promoter/regulatory sequence may, for example, be one which expresses the gene product in a tissue specific manner.

[0442] The term “constitutive” promoter refers to a nucleotide sequence which, when operably linked with a polynucleotide which encodes or specifies a gene product, causes the gene product to be produced in a cell under most or all physiological conditions of the cell.

[0443] The term “inducible” promoter refers to a nucleotide sequence which, when operably linked with a polynucleotide which encodes or specifies a gene product, causes the gene product to be produced in a cell substantially only when an inducer which corresponds to the promoter is present in the cell.

[0444] The term “tissue-specific” promoter refers to a nucleotide sequence which, when operably linked with a polynucleotide encodes or specified by a gene, causes the gene product to be produced in a cell substantially only if the cell is a cell of the tissue type corresponding to the promoter.

[0445] The terms “cancer associated antigen,” “tumor antigen,” “hyperproliferative disorder antigen,” and “antigen associated with a hyperproliferative disorder” interchangeably refer to antigens that are common to specific hyperproliferative disorders. In some embodiments, these terms refer to a molecule (typically a protein, carbohydrate or lipid) that is expressed on the surface of a cancer cell, either entirely or as a fragment (for example, MHC/peptide), and which is useful for the preferential targeting of a pharmacological agent to the cancer cell. In some embodiments, a tumor antigen is a marker expressed by both normal cells and cancer cells, for example, a lineage marker, for example, CD19 on B cells. In some embodiments, a tumor antigen is a cell surface molecule that is overexpressed in a cancer cell in comparison to a normal cell, for instance, 1-fold over expression, 2-fold overexpression, 3-fold overexpression or more in comparison to a normal cell. In some embodiments, a tumor antigen is a cell surface molecule that is inappropriately synthesized in the cancer cell, for instance, a molecule that contains deletions, additions or mutations in comparison to the molecule expressed on a normal cell. In some embodiments, a tumor antigen will be expressed exclusively on the cell surface of a cancer cell, entirely or as a fragment (for example, MHC/peptide), and not synthesized or expressed on the surface of a normal cell. In some embodiments, the hyperproliferative disorder antigens of the present invention are derived from, cancers including but not limited to primary or metastatic melanoma, thymoma, lymphoma, sarcoma, lung cancer, liver cancer, non-Hodgkin lymphoma, Hodgkin lymphoma, leukemias, uterine cancer, cervical cancer, bladder cancer, kidney cancer and adenocarcinomas such as breast cancer, prostate cancer (for example, castrate-resistant or therapy-resistant prostate cancer, or metastatic prostate cancer), ovarian cancer, pancreatic cancer, and the like, or a plasma cell proliferative disorder, for example, asymptomatic myeloma (smoldering multiple myeloma or indolent myeloma), monoclonal gammopathy of undetermined significance (MGUS), Waldenstrom’s macroglobulinemia, plasmacytomas (for example, plasma cell dyscrasia, solitary myeloma, solitary plasmacytoma, extramedullary plasmacytoma, and multiple plasmacytoma), systemic amyloid light chain amyloidosis, and POEMS syndrome (also known as Crow-Fukase syndrome, Takatsuki disease, and PEP syndrome). In some embodiments, the CARs of the present invention include CARs comprising an antigen binding domain (for example, antibody or antibody fragment) that binds to a MHC presented peptide. Normally, peptides derived from endogenous proteins fill the pockets of Major histocompatibility complex (MHC) class I molecules and are recognized by T cell receptors (TCRs) on CD8 + T lymphocytes. The MHC class I complexes are constitutively expressed by all nucleated cells. In cancer, virus-specific and/or tumor-specific peptide/MHC complexes represent a unique class of cell surface targets for immunotherapy. TCR-like antibodies targeting peptides derived from viral or tumor antigens in the context of human leukocyte antigen (HLA)-A1 or HLA-A2 have been described (see, for example, Sastry et al., J Virol. 2011 85(5):1935-1942; Sergeeva et al., Blood, 2011 117(16):4262-4272; Verma et al., J Immunol 2010 184(4):2156-2165; Willemsen et al., Gene Ther 2001 8(21) :1601-1608; Dao et al., Sci Transl Med 2013 5(176) :176ra33 ; Tassev et al., Cancer Gene Ther 2012 19(2):84-100). For example, TCR-like antibody can be identified from screening a library, such as a human scFv phage displayed library.

[0446] The term “tumor-supporting antigen” or “cancer-supporting antigen” interchangeably refer to a molecule (typically a protein, carbohydrate or lipid) that is expressed on the surface of a cell that is, itself, not cancerous, but supports the cancer cells, for example, by promoting their growth or survival for example, resistance to immune cells. Exemplary cells of this type include stromal cells and myeloid-derived suppressor cells (MDSCs). The tumor-supporting antigen itself need not play a role in supporting the tumor cells so long as the antigen is present on a cell that supports cancer cells.

[0447] The term “flexible polypeptide linker” or “linker” as used in the context of an scFv refers to a peptide linker that consists of amino acids such as glycine and/or serine residues used alone or in combination, to link variable heavy and variable light chain regions together. In some embodiments, the flexible polypeptide linker is a Gly/Ser linker and comprises the amino acid sequence (Gly-Gly-Gly-Ser)n, where n is a positive integer equal to or greater than 1 (SEQ ID NO: 41). For example, n=1, n=2, n=3. n=4, n=5 and n=6, n=7, n=8, n=9 and n=10 In some embodiments, the flexible polypeptide linkers include, but are not limited to, (Gly4 Ser)4 (SEQ ID NO: 27) or (Gly4 Ser)3 (SEQ ID NO: 28). In some embodiments, the linkers include multiple repeats of (Gly2Ser), (GlySer) or (Gly3Ser) (SEQ ID NO: 29). Also included within the scope of the invention are linkers described in WO2012/138475, incorporated herein by reference.

[0448] As used herein, a 5′ cap (also termed an RNA cap, an RNA 7-methylguanosine cap or an RNA m7G cap) is a modified guanine nucleotide that has been added to the “front” or 5′ end of a eukaryotic messenger RNA shortly after the start of transcription. The 5′ cap consists of a terminal group which is linked to the first transcribed nucleotide. Its presence is critical for recognition by the ribosome and protection from RNases. Cap addition is coupled to transcription, and occurs co-transcriptionally, such that each influences the other. Shortly after the start of transcription, the 5′ end of the mRNA being synthesized is bound by a cap-synthesizing complex associated with RNA polymerase. This enzymatic complex catalyzes the chemical reactions that are required for mRNA capping. Synthesis proceeds as a multi-step biochemical reaction. The capping moiety can be modified to modulate functionality of mRNA such as its stability or efficiency of translation.

[0449] As used herein, “in vitro transcribed RNA” refers to RNA that has been synthesized in vitro. In some embodiments the RNA is mRNA. Generally, the in vitro transcribed RNA is generated from an in vitro transcription vector. The in vitro transcription vector comprises a template that is used to generate the in vitro transcribed RNA.

[0450] As used herein, a “poly(A)” is a series of adenosines attached by polyadenylation to the mRNA. In some embodiments of a construct for transient expression, the poly(A) is between 50 and 5000 (SEQ ID NO: 30). In some embodiments the poly(A) is greater than 64. In some embodiments the poly(A)is greater than 100. In some embodiments the poly(A) is greater than 300. In some embodiments the poly(A) is greater than 400. poly(A) sequences can be modified chemically or enzymatically to modulate mRNA functionality such as localization, stability or efficiency of translation.

[0451] As used herein, “polyadenylation” refers to the covalent linkage of a polyadenylyl moiety, or its modified variant, to a messenger RNA molecule. In eukaryotic organisms, most messenger RNA (mRNA) molecules are polyadenylated at the 3′ end. The 3′ poly(A) tail is a long sequence of adenine nucleotides (often several hundred) added to the pre-mRNA through the action of an enzyme, polyadenylate polymerase. In higher eukaryotes, the poly(A) tail is added onto transcripts that contain a specific sequence, the polyadenylation signal. The poly(A) tail and the protein bound to it aid in protecting mRNA from degradation by exonucleases. Polyadenylation is also important for transcription termination, export of the mRNA from the nucleus, and translation. Polyadenylation occurs in the nucleus immediately after transcription of DNA into RNA, but additionally can also occur later in the cytoplasm. After transcription has been terminated, the mRNA chain is cleaved through the action of an endonuclease complex associated with RNA polymerase. The cleavage site is usually characterized by the presence of the base sequence AAUAAA near the cleavage site. After the mRNA has been cleaved, adenosine residues are added to the free 3′ end at the cleavage site.

[0452] As used herein, “transient” refers to expression of a non-integrated transgene for a period of hours, days or weeks, wherein the period of time of expression is less than the period of time for expression of the gene if integrated into the genome or contained within a stable plasmid replicon in the host cell.

[0453] As used herein, the terms “treat”, “treatment” and “treating” refer to the reduction or amelioration of the progression, severity and/or duration of a proliferative disorder, or the amelioration of one or more symptoms (preferably, one or more discernible symptoms) of a proliferative disorder resulting from the administration of one or more therapies (for example, one or more therapeutic agents such as a CAR of the invention). In specific embodiments, the terms “treat”, “treatment” and “treating” refer to the amelioration of at least one measurable physical parameter of a proliferative disorder, such as growth of a tumor, not necessarily discernible by the patient. In other embodiments the terms “treat”, “treatment” and “treating” -refer to the inhibition of the progression of a proliferative disorder, either physically by, for example, stabilization of a discernible symptom, physiologically by, for example, stabilization of a physical parameter, or both. In other embodiments the terms “treat”, “treatment” and “treating” refer to the reduction or stabilization of tumor size or cancerous cell count.

[0454] The term “signal transduction pathway” refers to the biochemical relationship between a variety of signal transduction molecules that play a role in the transmission of a signal from one portion of a cell to another portion of a cell. The phrase “cell surface receptor” includes molecules and complexes of molecules capable of receiving a signal and transmitting signal across the membrane of a cell.

[0455] The term “subject” is intended to include living organisms in which an immune response can be elicited (for example, mammals, for example, human).

[0456] The term, a “substantially purified” cell refers to a cell that is essentially free of other cell types. A substantially purified cell also refers to a cell which has been separated from other cell types with which it is normally associated in its naturally occurring state. In some instances, a population of substantially purified cells refers to a homogenous population of cells. In other instances, this term refers simply to cell that have been separated from the cells with which they are naturally associated in their natural state. In some embodiments, the cells are cultured in vitro. In some embodiments, the cells are not cultured in vitro.

[0457] The term “therapeutic” as used herein means a treatment. A therapeutic effect is obtained by reduction, suppression, remission, or eradication of a disease state.

[0458] The term “prophylaxis” as used herein means the prevention of or protective treatment for a disease or disease state.

[0459] The term “transfected” or “transformed” or “transduced” refers to a process by which exogenous nucleic acid is transferred or introduced into the host cell. A “transfected” or “transformed” or “transduced” cell is one which has been transfected, transformed or transduced with exogenous nucleic acid. The cell includes the primary subject cell and its progeny.

[0460] The term “specifically binds,” refers to an antibody, or a ligand, which recognizes and binds with a cognate binding partner (for example, a stimulatory and/or costimulatory molecule present on a T cell) protein present in a sample, but which antibody or ligand does not substantially recognize or bind other molecules in the sample.

[0461] “Regulatable chimeric antigen receptor (RCAR),” as used herein, refers to a set of polypeptides, typically two in the simplest embodiments, which when in an immune effector cell, provides the cell with specificity for a target cell, typically a cancer cell, and with intracellular signal generation. In some embodiments, an RCAR comprises at least an extracellular antigen binding domain, a transmembrane domain and a cytoplasmic signaling domain (also referred to herein as “an intracellular signaling domain”) comprising a functional signaling domain derived from a stimulatory molecule and/or costimulatory molecule as defined herein in the context of a CAR molecule. In some embodiments, the set of polypeptides in the RCAR are not contiguous with each other, for example, are in different polypeptide chains. In some embodiments, the RCAR includes a dimerization switch that, upon the presence of a dimerization molecule, can couple the polypeptides to one another, for example, can couple an antigen binding domain to an intracellular signaling domain. In some embodiments, the RCAR is expressed in a cell (for example, an immune effector cell) as described herein, for example, an RCAR-expressing cell (also referred to herein as “RCARX cell”). In some embodiments the RCARX cell is a T cell and is referred to as a RCART cell. In some embodiments the RCARX cell is an NK cell, and is referred to as a RCARN cell. The RCAR can provide the RCAR-expressing cell with specificity for a target cell, typically a cancer cell, and with regulatable intracellular signal generation or proliferation, which can optimize an immune effector property of the RCAR-expressing cell. In embodiments, an RCAR cell relies at least in part, on an antigen binding domain to provide specificity to a target cell that comprises the antigen bound by the antigen binding domain.

[0462] “Membrane anchor” or “membrane tethering domain”, as that term is used herein, refers to a polypeptide or moiety, for example, a myristoyl group, sufficient to anchor an extracellular or intracellular domain to the plasma membrane.

[0463] “Switch domain,” as that term is used herein, for example, when referring to an RCAR, refers to an entity, typically a polypeptide-based entity, that, in the presence of a dimerization molecule, associates with another switch domain. The association results in a functional coupling of a first entity linked to, for example, fused to, a first switch domain, and a second entity linked to, for example, fused to, a second switch domain. A first and second switch domain are collectively referred to as a dimerization switch. In embodiments, the first and second switch domains are the same as one another, for example, they are polypeptides having the same primary amino acid sequence and are referred to collectively as a homodimerization switch. In embodiments, the first and second switch domains are different from one another, for example, they are polypeptides having different primary amino acid sequences, and are referred to collectively as a heterodimerization switch. In embodiments, the switch is intracellular. In embodiments, the switch is extracellular. In embodiments, the switch domain is a polypeptide-based entity, for example, FKBP or FRB-based, and the dimerization molecule is small molecule, for example, a rapalogue. In embodiments, the switch domain is a polypeptide-based entity, for example, an scFv that binds a myc peptide, and the dimerization molecule is a polypeptide, a fragment thereof, or a multimer of a polypeptide, for example, a myc ligand or multimers of a myc ligand that bind to one or more myc scFvs. In embodiments, the switch domain is a polypeptide-based entity, for example, myc receptor, and the dimerization molecule is an antibody or fragments thereof, for example, myc antibody.

[0464] “Dimerization molecule,” as that term is used herein, for example, when referring to an RCAR, refers to a molecule that promotes the association of a first switch domain with a second switch domain. In embodiments, the dimerization molecule does not naturally occur in the subject or does not occur in concentrations that would result in significant dimerization. In embodiments, the dimerization molecule is a small molecule, for example, rapamycin or a rapalogue, for example, RAD001.

[0465] The term “low, immune enhancing, dose” when used in conjunction with an mTOR inhibitor, for example, an allosteric mTOR inhibitor, for example, RAD001 or rapamycin, or a catalytic mTOR inhibitor, refers to a dose of mTOR inhibitor that partially, but not fully, inhibits mTOR activity, for example, as measured by the inhibition of P70 S6 kinase activity. Methods for evaluating mTOR activity, for example, by inhibition of P70 S6 kinase, are discussed herein. The dose is insufficient to result in complete immune suppression but is sufficient to enhance the immune response. In some embodiments, the low, immune enhancing, dose of mTOR inhibitor results in a decrease in the number of PD-1 positive T cells and/or an increase in the number of PD-1 negative T cells, or an increase in the ratio of PD-1 negative T cells/PD-1 positive T cells. In some embodiments, the low, immune enhancing, dose of mTOR inhibitor results in an increase in the number of naive T cells. In some embodiments, the low, immune enhancing, dose of mTOR inhibitor results in one or more of the following:
[0466] an increase in the expression of one or more of the following markers: CD62L^{high}, CD127^{high}, CD27⁺, and BCL2, for example, on memory T cells, for example, memory T cell precursors;
[0467] a decrease in the expression of KLRG1, for example, on memory T cells, for example, memory T cell precursors; and
[0468] an increase in the number of memory T cell precursors, for example, cells with any one or combination of the following characteristics: increased CD62L^{high}, increased CD127^{high}, increased CD27⁺, decreased KLRG1, and increased BCL2;
[0469] wherein any of the changes described above occurs, for example, at least transiently, for example, as compared to a non-treated subject.

[0470] “Refractory” as used herein refers to a disease, for example, cancer, that does not respond to a treatment. In embodiments, a refractory cancer can be resistant to a treatment before or at the beginning of the treatment. In other embodiments, the refractory cancer can become resistant during a treatment. A refractory cancer is also called a resistant cancer.

[0471] “Relapsed” or “relapse” as used herein refers to the return or reappearance of a disease (for example, cancer) or the signs and symptoms of a disease such as cancer after a period of improvement or responsiveness, for example, after prior treatment of a therapy, for example, cancer therapy. The initial period of responsiveness may involve the level of cancer cells falling below a certain threshold, for example, below 20%, 1%, 10%, 5%, 4%, 3%, 2%, or 1%. The reappearance may involve the level of cancer cells rising above a certain threshold, for example, above 20%, 1%, 10%, 5%, 4%, 3%, 2%, or 1%. For example, for example, in the context of B-ALL, the reappearance may involve, for example, a reappearance of blasts in the blood, bone marrow (> 5%), or any extramedullary site, after a complete response. A complete response, in this context, may involve < 5% BM blast. More generally, in some embodiments, a response (for example, complete response or partial response) can involve the absence of detectable MRD (minimal residual disease). In some embodiments, the initial period of responsiveness lasts at least 1, 2, 3, 4, 5, or 6 days; at least 1, 2, 3, or 4 weeks; at least 1, 2, 3, 4, 6, 8, 10, or 12 months; or at least 1, 2, 3, 4, or 5 years.

[0472] Ranges: throughout this disclosure, various embodiments of the invention can be presented in a range format. It should be understood that the description in range format is merely for convenience and brevity and should not be construed as an inflexible limitation on the scope of the invention. Accordingly, the description of a range should be considered to have specifically disclosed all the possible subranges as well as individual numerical values within that range. For example, description of a range such as from 1 to 6 should be considered to have specifically disclosed subranges such as from 1 to 3, from 1 to 4, from 1 to 5, from 2 to 4, from 2 to 6, from 3 to 6 etc., as well as individual numbers within that range, for example, 1, 2, 2.7, 3, 4, 5, 5.3, and 6. As another example, a range such as 95-99% identity, includes something with 95%, 96%, 97%, 98%, or 99% identity, and includes subranges such as 96-99%, 96-98%, 96-97%, 97-99%, 97-98%, and 98-99% identity. This applies regardless of the breadth of the range.

[0473] A “gene editing system” as the term is used herein, refers to a system, for example, one or more molecules, that direct and effect an alteration, for example, a deletion, of one or more nucleic acids at or near a site of genomic DNA targeted by said system. Gene editing systems are known in the art and are described more fully below.

[0474] Administered “in combination”, as used herein, means that two (or more) different treatments are delivered to the subject during the course of the subject’s affliction with the disorder, for example, the two or more treatments are delivered after the subject has been diagnosed with the disorder and before the disorder has been cured or eliminated or treatment has ceased for other reasons. In some embodiments, the delivery of one treatment is still occurring when the delivery of the second begins, so that there is overlap in terms of administration. This is sometimes referred to herein as “simultaneous” or “concurrent delivery”. In other embodiments, the delivery of one treatment ends before the delivery of the other treatment begins. In some embodiments of either case, the treatment is more effective because of combined administration. For example, the second treatment is more effective, for example, an equivalent effect is seen with less of the second treatment, or the second treatment reduces symptoms to a greater extent, than would be seen if the second treatment were administered in the absence of the first treatment, or the analogous situation is seen with the first treatment. In some embodiments, delivery is such that the reduction in a symptom, or other parameter related to the disorder is greater than what would be observed with one treatment delivered in the absence of the other. The effect of the two treatments can be partially additive, wholly additive, or greater than additive. The delivery can be such that an effect of the first treatment delivered is still detectable when the second is delivered.

[0475] The term “depletion” or “depleting”, as used interchangeably herein, refers to the decrease or reduction of the level or amount of a cell, a protein, or macromolecule in a sample after a process, for example, a selection step, for example, a negative selection, is performed. The depletion can be a complete or partial depletion of the cell, protein, or macromolecule. In some embodiments, the depletion is at least a 1%, 2%, 5%, 10%, 15%, 20%, 25%, 30%, 35%, 40%, 45%, 50%, 55%, 60%, 65%, 70%, 75%, 80%, 85%, 90%, 95%, or 99% decrease or reduction of the level or amount of a cell, a protein, or macromolecule, as compared to the level or amount of the cell, protein or macromolecule in the sample before the process was performed.

[0476] As used herein, a “naive T cell” refers to a T cell that is antigen-inexperienced. In some embodiments, an antigen-inexperienced T cell has encountered its cognate antigen in the thymus but not in the periphery. In some embodiments, naive T cells are precursors of memory cells. In some embodiments, naive T cells express both CD45RA and CCR7, but do not express CD45RO. In some embodiments, naive T cells may be characterized by expression of CD62L, CD27, CCR7, CD45RA, CD28, and CD127, and the absence of CD95 or CD45RO isoform. In some embodiments, naive T cells express CD62L, IL-7 receptor-α, IL-6 receptor, and CD132, but do not express CD25, CD44, CD69, or CD45RO. In some embodiments, naive T cells express CD45RA, CCR7, and CD62L and do not express CD95 or IL-2 receptor β. In some embodiments, surface expression levels of markers are assessed using flow cytometry.

[0477] The term “central memory T cells” refers to a subset of T cells that in humans are CD45RO positive and express CCR7. In some embodiments, central memory T cells express CD95. In some embodiments, central memory T cells express IL-2R, IL-7R and/or IL-15R. In some embodiments, central memory T cells express CD45RO, CD95, IL-2 receptor β, CCR7, and CD62L. In some embodiments, surface expression levels of markers are assessed using flow cytometry.

[0478] The term “stem memory T cells,” “stem cell memory T cells,” “stem cell-like memory T cells,” “memory stem T cells,” “T memory stem cells,” “T stem cell memory cells” or “TSCM cells” refers to a subset of memory T cells with stem cell-like ability, for example, the ability to self-renew and/or the multipotent capacity to reconstitute memory and/or effector T cell subsets. In some embodiments, stem memory T cells express CD45RA, CD95, IL-2 receptor β, CCR7, and CD62L. In some embodiments, surface expression levels of markers are assessed using flow cytometry. In some embodiments, exemplary stem memory T cells are disclosed in Gattinoni et al., Nat Med. 2017 January 06; 23(1): 18-27, herein incorporated by reference in its entirety.

[0479] For clarity purposes, unless otherwise noted, classifying a cell or a population of cells as “not expressing,” or having an “absence of” or being “negative for” a particular marker may not necessarily mean an absolute absence of the marker. The skilled artisan can readily compare the cell against a positive and/or a negative control, and/or set a predetermined threshold, and classify the cell or population of cells as not expressing or being negative for the marker when the cell has an expression level below the predetermined threshold or a population of cells has an overall expression level below the predetermined threshold using conventional detection methods, e.g., using flow cytometry, for example, as described in the Examples herein. For example, representative gating strategies are shown in FIG. 1G. For example, CCR7 positive, CD45RO negative cells are shown in the top left quadrant in FIG. 1G.

[0480] As used herein, the term “GeneSetScore (Up TEM vs. Down TSCM)″ of a cell refers to a score that reflects the degree at which the cell shows an effector memory T cell (TEM) phenotype vs. a stem cell memory T cell (TSCM) phenotype. A higher GeneSetScore (Up TEM vs. Down TSCM) indicates an increasing TEM phenotype, whereas a lower GeneSetScore (Up TEM vs. Down TSCM) indicates an increasing TSCM phenotype. In some embodiments, the GeneSetScore (Up TEM vs. Down TSCM) is determined by measuring the expression of one or more genes that are up-regulated in TEM cells and/or down-regulated in TSCM cells, for example, one or more genes selected from the group consisting of MXRA7, CLIC1, NAT13, TBC1D2B, GLCCI1, DUSP10, APOBEC3D, CACNB3, ANXA2P2, TPRG1, EOMES, MATK, ARHGAP10, ADAM8, MAN1A1, SLFN12L, SH2D2A, EIF2C4, CD58, MYO1F, RAB27B, ERN1, NPC1, NBEAL2, APOBEC3G, SYTL2, SLC4A4, PIK3AP1, PTGDR, MAF, PLEKHA5, ADRB2, PLXND1, GNAO1, THBS1, PPP2R2B, CYTH3, KLRF1, FLJ16686, AUTS2, PTPRM, GNLY, and GFPT2. In some embodiments, the GeneSetScore (Up TEM vs. Down TSCM) is determined for each cell using RNA-seq, for example, single-cell RNA-seq (scRNA-seq), for example, as exemplified in Example 10 with respect to FIG. 39A. In some embodiments, the GeneSetScore (Up TEM vs. Down TSCM) is calculated by taking the mean log normalized gene expression value of all of the genes in the gene set.

[0481] As used herein, the term “GeneSetScore (Up Treg vs. Down Teff)″ of a cell refers to a score that reflects the degree at which the cell shows a regulatory T cell (Treg) phenotype vs. an effector T cell (Teff) phenotype. A higher GeneSetScore (Up Treg vs. Down Teff) indicates an increasing Treg phenotype, whereas a lower GeneSetScore (Up Treg vs. Down Teff) indicates an increasing Teff phenotype. In some embodiments, the GeneSetScore (Up Treg vs. Down Teff) is determined by measuring the expression of one or more genes that are up-regulated in Treg cells and/or down-regulated in Teff cells, for example, one or more genes selected from the group consisting of C12orf75, SELPLG, SWAP70, RGS1, PRR11, SPATS2L, SPATS2L, TSHR, C14orf145, CASP8, SYT11, ACTN4, ANXA5, GLRX, HLA-DMB, PMCH, RAB11FIP1, IL32, FAM160B1, SHMT2, FRMD4B, CCR3, TNFRSF13B, NTNG2, CLDND1, BARD1, FCER1G, TYMS, ATP1B1, GJB6, FGL2, TK1, SLC2A8, CDKN2A, SKAP2, GPR55, CDCA7, S100A4, GDPD5, PMAIP1, ACOT9, CEP55, SGMS1, ADPRH, AKAP2, HDAC9, IKZF4, CARD17, VAV3, OBFC2A, ITGB1, CIITA, SETD7, HLA-DMA, CCR10, KIAA0101, SLC14A1, PTTG3P, DUSP10, FAM164A, PYHIN1, MYO1F, SLC1A4, MYBL2, PTTG1, RRM2, TP53INP1, CCR5, ST8SIA6, TOX, BFSP2, ITPRIPL1, NCAPH, HLA-DPB2, SYT4, NINJ2, FAM46C, CCR4, GBP5, C15orf53, LMCD1, MKI67, NUSAP1, PDE4A, E2F2, CD58, ARHGEF12, LOC100188949, FAS, HLA-DPB1, SELP, WEE1, HLA-DPA1, FCRL1, ICA1, CNTNAP1, OAS1, METTL7A, CCR6, HLA-DRB4, ANXA2P3, STAM, HLA-DQB2, LGALS1, ANXA2, PI16, DUSP4, LAYN, ANXA2P2, PTPLA, ANXA2P1, ZNF365, LAIR2, LOC541471, RASGRP4, BCAS1, UTS2, MIAT, PRDM1, SEMA3G, FAM129A, HPGD, NCF4, LGALS3, CEACAM4, JAKMIP1, TIGIT, HLA-DRA, IKZF2, HLA-DRB1, FANK1, RTKN2, TRIB1, FCRL3, and FOXP3. In some embodiments, the GeneSetScore (Up Treg vs. Down Teff) is determined using RNA-seq, for example, single-cell RNA-seq (scRNA-seq), for example, as exemplified in Example 10 with respect to FIG. 39B. In some embodiments, the GeneSetScore (Up Treg vs. Down Teff) is calculated by taking the mean log normalized gene expression value of all of the genes in the gene set.

[0482] As used herein, the term “GeneSetScore (Down stemness)” of a cell refers to a score that reflects the degree at which the cell shows a stemness phenotype. A lower GeneSetScore (Down stemness) indicates an increasing stemness phenotype. In some embodiments, the GeneSetScore (Down stemness) is determined by measuring the expression of one or more genes that are upregulated in a differentiating stem cell vs downregulated in a hematopoietic stem cell, for example, one or more genes selected from the group consisting of ACE, BATF, CDK6, CHD2, ERCC2, HOXB4, MEOX1, SFRP1, SP7, SRF, TAL1, and XRCC5. In some embodiments, the GeneSetScore (Down stemness) is determined using RNA-seq, for example, single-cell RNA-seq (scRNA-seq), for example, as exemplified in Example 10 with respect to FIG. 39C. In some embodiments, the GeneSetScore (Down stemness) is calculated by taking the mean log normalized gene expression value of all of the genes in the gene set.

[0483] As used herein, the term “GeneSetScore (Up hypoxia)” of a cell refers to a score that reflects the degree at which the cell shows a hypoxia phenotype. A higher GeneSetScore (Up hypoxia) indicates an increasing hypoxia phenotype. In some embodiments, the GeneSetScore (Up hypoxia) is determined by measuring the expression of one or more genes that are up-regulated in cells undergoing hypoxia, for example, one or more genes selected from the group consisting of ABCB1, ACAT1, ADM, ADORA2B, AK2, AK3, ALDH1A1, ALDH1A3, ALDOA, ALDOC, ANGPT2, ANGPTL4, ANXA1, ANXA2, ANXA5, ARHGAP5, ARSE, ART1, BACE2, BATF3, BCL2L1, BCL2L2, BHLHE40, BHLHE41, BIK, BIRC2, BNIP3, BNIP3L, BPI, BTG1, C11orf2, C7orf68, CA12, CA9, CALD1, CCNG2, CCT6A, CD99, CDK1, CDKN1A, CDKN1B, CITED2, CLK1, CNOT7, COL4A5, COL5A1, COL5A2, COL5A3, CP, CTSD, CXCR4, D4S234E, DDIT3, DDIT4, 1-Dec, DKC1, DR1, EDN1, EDN2, EFNA1, EGF, EGR1, EIF4A3, ELF3, ELL2, ENG, ENO1, ENO3, ENPEP, EPO, ERRFI1, ETS1, F3, FABP5, FGF3, FKBP4, FLT1, FN1, FOS, FTL, GAPDH, GBE1, GLRX, GPI, GPRC5A, HAP1, HBP1, HDAC1, HDAC9, HERC3, HERPUD1, HGF, HIF1A, HK1, HK2, HLA-DQB1, HMOX1, HMOX2, HSPA5, HSPD1, HSPH1, HYOU1, ICAM1, ID2, IFI27, IGF2, IGFBP1, IGFBP2, IGFBP3, IGFBP5, IL6, IL8, INSIG1, IRF6, ITGA5, JUN, KDR, KRT14, KRT18, KRT19, LDHA, LDHB, LEP, LGALS1, LONP1, LOX, LRP1, MAP4, MET, MIF, MMP13, MMP2, MMP7, MPI, MT1L, MTL3P, MUC1, MXI1, NDRG1, NFIL3, NFKB1, NFKB2, NOS1, NOS2, NOS2P1, NOS2P2, NOS3, NR3C1, NR4A1, NT5E, ODC1, P4HA1, P4HA2, PAICS, PDGFB, PDK3, PFKFB1, PFKFB3, PFKFB4, PFKL, PGAM1, PGF, PGK1, PGK2, PGM1, PIM1, PIM2, PKM2, PLAU, PLAUR, PLIN2, PLOD2, PNN, PNP, POLM, PPARA, PPAT, PROK1, PSMA3, PSMD9, PTGS1, PTGS2, QSOX1, RBPJ, RELA, RIOK3, RNASEL, RPL36A, RRP9, SAT1, SERPINB2, SERPINE1, SGSM2, SIAH2, SIN3A, SIRPA, SLC16A1, SLC16A2, SLC20A1, SLC2A1, SLC2A3, SLC3A2, SLC6A10P, SLC6A16, SLC6A6, SLC6A8, SORL1, SPP1, SRSF6, SSSCA1, STC2, STRA13, SYT7, TBPL1, TCEAL1, TEK, TF, TFF3, TFRC, TGFA, TGFB1, TGFB3, TGFBI, TGM2, TH, THBS1, THBS2, TIMM17A, TNFAIP3, TP53, TPBG, TPD52, TPI1, TXN, TXNIP, UMPS, VEGFA, VEGFB, VEGFC, VIM, VPS11, and XRCC6. In some embodiments, the GeneSetScore (Up hypoxia) is determined using RNA-seq, for example, single-cell RNA-seq (scRNA-seq), for example, as exemplified in Example 10 with respect to FIG. 39D. In some embodiments, the GeneSetScore (Up hypoxia) is calculated by taking the mean log normalized gene expression value of all of the genes in the gene set.

[0484] As used herein, the term “GeneSetScore (Up autophagy)” of a cell refers to a score that reflects the degree at which the cell shows an autophagy phenotype. A higher GeneSetScore (Up autophagy) indicates an increasing autophagy phenotype. In some embodiments, the GeneSetScore (Up autophagy) is determined by measuring the expression of one or more genes that are up-regulated in cells undergoing autophagy, for example, one or more genes selected from the group consisting of ABL1, ACBD5, ACIN1, ACTRT1, ADAMTS7, AKR1E2, ALKBH5, ALPK1, AMBRA1, ANXA5, ANXA7, ARSB, ASB2, ATG10, ATG12, ATG13, ATG14, ATG16L1, ATG16L2, ATG2A, ATG2B, ATG3, ATG4A, ATG4B, ATG4C, ATG4D, ATG5, ATG7, ATG9A, ATG9B, ATP13A2, ATP1B1, ATPAF1-AS1, ATPIF1, BECN1, BECN1P1, BLOC1S1, BMP2KL, BNIP1, BNIP3, BOC, C11orf2, C11orf41, C12orf44, C12orf5, C14orf133, C1orf210, C5, C6orf106, C7orf59, C7orf68, C8orf59, C9orf72, CA7, CALCB, CALCOCO2, CAPS, CCDC36, CD163L1, CD93, CDC37, CDKN2A, CHAF1B, CHMP2A, CHMP2B, CHMP3, CHMP4A, CHMP4B, CHMP4C, CHMP6, CHST3, CISD2, CLDN7, CLEC16A, CLN3, CLVS1, COX8A, CPA3, CRNKL1, CSPG5, CTSA, CTSB, CTSD, CXCR7, DAP, DKKL1, DNAAF2, DPF3, DRAM1, DRAM2, DYNLL1, DYNLL2, DZANK1, EI24, EIF2S1, EPG5, EPM2A, FABP1, FAM125A, FAM131B, FAM134B, FAM13B, FAM176A, FAM176B, FAM48A, FANCC, FANCF, FANCL, FBXO7, FCGR3B, FGF14, FGF7, FGFBP1, FIS1, FNBP1L, FOXO1, FUNDC1, FUNDC2, FXR2, GABARAP, GABARAPL1, GABARAPL2, GABARAPL3, GABRA5, GDF5, GMIP, HAP1, HAPLN1, HBXIP, HCAR1, HDAC6, HGS, HIST1H3A, HIST1H3B, HIST1H3C, HIST1H3D, HIST1H3E, HIST1H3F, HIST1H3G, HIST1H3H, HIST1H3I, HIST1H3J, HK2, HMGB1, HPR, HSF2BP, HSP90AA1, HSPA8, IFI16, IPPK, IRGM, IST1, ITGB4, ITPKC, KCNK3, KCNQ1, KIAA0226, KIAA1324, KRCC1, KRT15, KRT73, LAMP1, LAMP2, LAMTOR1, LAMTOR2, LAMTOR3, LARP1B, LENG9, LGALS8, LIX1, LIX1L, LMCD1, LRRK2, LRSAM1, LSM4, MAP1A, MAP1LC3A, MAP1LC3B, MAP1LC3B2, MAP1LC3C, MAP1S, MAP2K1, MAP3K12, MARK2, MBD5, MDH1, MEX3C, MFN1, MFN2, MLST8, MRPS10, MRPS2, MSTN, MTERFD1, MTMR14, MTMR3, MTOR, MTSS1, MYH11, MYLK, MYOM1, NBR1, NDUFB9, NEFM, NHLRC1, NME2, NPC1, NR2C2, NRBF2, NTHL1, NUP93, OBSCN, OPTN, P2RX5, PACS2, PARK2, PARK7, PDK1, PDK4, PEX13, PEX3, PFKP, PGK2, PHF23, PHYHIP, PI4K2A, PIK3C3, PIK3CA, PIK3CB, PIK3R4, PINK1, PLEKHM1, PLOD2, PNPO, PPARGC1A, PPY, PRKAA1, PRKAA2, PRKAB1, PRKAB2, PRKAG1, PRKAG2, PRKAG3, PRKD2, PRKG1, PSEN1, PTPN22, RAB12, RAB1A, RAB1B, RAB23, RAB24, RAB33B, RAB39, RAB7A, RB1CC1, RBM18, REEP2, REP15, RFWD3, RGS19, RHEB, RIMS3, RNF185, RNF41, RPS27A, RPTOR, RRAGA, RRAGB, RRAGC, RRAGD, S100A8, S100A9, SCN1A, SERPINB10, SESN2, SFRP4, SH3GLB1, SIRT2, SLC1A3, SLC1A4, SLC22A3, SLC25A19, SLC35B3, SLC35C1, SLC37A4, SLC6A1, SLCO1A2, SMURF1, SNAP29, SNAPIN, SNF8, SNRPB, SNRPB2, SNRPD1, SNRPF, SNTG1, SNX14, SPATA18, SQSTM1, SRPX, STAM, STAM2, STAT2, STBD1, STK11, STK32A, STOM, STX12, STX17, SUPT3H, TBC1D17, TBC1D25, TBC1D5, TCIRG1, TEAD4, TECPR1, TECPR2, TFEB, TM9SF1, TMBIM6, TMEM203, TMEM208, TMEM39A, TMEM39B, TMEM59, TMEM74, TMEM93, TNIK, TOLLIP, TOMM20, TOMM22, TOMM40, TOMM5, TOMM6, TOMM7, TOMM70A, TP53INP1, TP53INP2, TRAPPC8, TREM1, TRIM17, TRIM5, TSG101, TXLNA, UBA52, UBB, UBC, UBQLN1, UBQLN2, UBQLN4, ULK1, ULK2, ULK3, USP10, USP13, USP30, UVRAG, VAMP7, VAMP8, VDAC1, VMP1, VPS11, VPS16, VPS18, VPS25, VPS28, VPS33A, VPS33B, VPS36, VPS37A, VPS37B, VPS37C, VPS37D, VPS39, VPS41, VPS4A, VPS4B, VTA1, VTI1A, VTI1B, WDFY3, WDR45, WDR45L, WIPI1, WIPI2, XBP1, YIPF1, ZCCHC17, ZFYVE1, ZKSCAN3, ZNF189, ZNF593, and ZNF681. In some embodiments, the GeneSetScore (Up autophagy) is determined using RNA-seq, for example, single-cell RNA-seq (scRNA-seq), for example, as exemplified in Example 10 with respect to FIG. 39E. In some embodiments, the GeneSetScore (Up autophagy) is calculated by taking the mean log normalized gene expression value of all of the genes in the gene set.

[0485] As used herein, the term “GeneSetScore (Up resting vs. Down activated)″ of a cell refers to a score that reflects the degree at which the cell shows a resting T cell phenotype vs. an activated T cell phenotype. A higher GeneSetScore (Up resting vs. Down activated) indicates an increasing resting T cell phenotype, whereas a lower GeneSetScore (Up resting vs. Down activated) indicates an increasing activated T cell phenotype. In some embodiments, the GeneSetScore (Up resting vs. Down activated) is determined by measuring the expression of one or more genes that are up-regulated in resting T cells and/or down-regulated in activated T cells, for example, one or more genes selected from the group consisting of ABCA7, ABCF3, ACAP2, AMT, ANKH, ATF7IP2, ATG14, ATP1A1, ATXN7, ATXN7L3B, BCL7A, BEX4, BSDC1, BTG1, BTG2, BTN3A1, C11orf21, C19orf22, C21orf2, CAMK2G, CARS2, CCNL2, CD248, CD5, CD55, CEP164, CHKB, CLK1, CLK4, CTSL1, DBP, DCUN1D2, DENND1C, DGKD, DLG1, DUSP1, EAPP, ECE1, ECHDC2, ERBB2IP, FAM117A, FAM134B, FAM134C, FAM169A, FAM190B, FAU, FLJ10038, FOXJ2, FOXJ3, FOXL1, FOXO1, FXYD5, FYB, HLA-E, HSPA1L, HYAL2, ICAM2, IFIT5, IFITM1, IKBKB, IQSEC1, IRS4, KIAA0664L3, KIAA0748, KLF3, KLF9, KRT18, LEF1, LINC00342, LIPA, LIPT1, LLGL2, LMBR1L, LPAR2, LTBP3, LYPD3, LZTFL1, MANBA, MAP2K6, MAP3K1, MARCH8, MAU2, MGEA5, MMP8, MPO, MSL1, MSL3, MYH3, MYLIP, NAGPA, NDST2, NISCH, NKTR, NLRP1, NOSIP, NPIP, NUMA1, PAIP2B, PAPD7, PBXIP1, PCIF1, PI4KA, PLCL2, PLEKHA1, PLEKHF2, PNISR, PPFIBP2, PRKCA, PRKCZ, PRKD3, PRMT2, PTP4A3, PXN, RASA2, RASA3, RASGRP2, RBM38, REPIN1, RNF38, RNF44, ROR1, RPL30, RPL32, RPLP1, RPS20, RPS24, RPS27, RPS6, RPS9, RXRA, RYK, SCAND2, SEMA4C, SETD1B, SETD6, SETX, SF3B1, SH2B1, SLC2A4RG, SLC35E2B, SLC46A3, SMAGP, SMARCE1, SMPD1, SNPH, SP140L, SPATA6, SPG7, SREK1IP1, SRSF5, STAT5B, SVIL, SYF2, SYNJ2BP, TAF1C, TBC1D4, TCF20, TECTA, TES, TMEM127, TMEM159, TMEM30B, TMEM66, TMEM8B, TP53TG1, TPCN1, TRIM22, TRIM44, TSC1, TSC22D1, TSC22D3, TSPYL2, TTC9, TTN, UBE2G2, USP33, USP34, VAMP1, VILL, VIPR1, VPS13C, ZBED5, ZBTB25, ZBTB40, ZC3H3, ZFP161, ZFP36L1, ZFP36L2, ZHX2, ZMYM5, ZNF136, ZNF148, ZNF318, ZNF350, ZNF512B, ZNF609, ZNF652, ZNF83, ZNF862, and ZNF91. In some embodiments, the GeneSetScore (Up resting vs. Down activated) is determined using RNA-seq, for example, single-cell RNA-seq (scRNA-seq), for example, as exemplified in Example 10 with respect to FIG. 38D. In some embodiments, the GeneSetScore (Up resting vs. Down activated) is calculated by taking the mean log normalized gene expression value of all of the genes in the gene set.

[0486] As used herein, the term “GeneSetScore (Progressively up in memory differentiation)” of a cell refers to a score that reflects the stage of the cell in memory differentiation. A higher GeneSetScore (Progressively up in memory differentiation) indicates an increasing late memory T cell phenotype, whereas a lower GeneSetScore (Progressively up in memory differentiation) indicates an increasing early memory T cell phenotype. In some embodiments, the GeneSetScore (Up autophagy) is determined by measuring the expression of one or more genes that are up-regulated during memory differentiation, for example, one or more genes selected from the group consisting of MTCH2, RAB6C, KIAA0195, SETD2, C2orf24, NRD1, GNA13, COPA, SELT, TNIP1, CBFA2T2, LRP10, PRKCI, BRE, ANKS1A, PNPLA6, ARL6IP1, WDFY1, MAPK1, GPR153, SHKBP1, MAP1LC3B2, PIP4K2A, HCN3, GTPBP1, TLN1, C4orf34, KIF3B, TCIRG1, PPP3CA, ATG4D, TYMP, TRAF6, C17orf76, WIPF1, FAM108A1, MYL6, NRM, SPCS2, GGT3P, GALK1, CLIP4, ARL4C, YWHAQ, LPCAT4, ATG2A, IDS, TBC1D5, DMPK, ST6GALNAC6, REEP5, ABHD6, KIAA0247, EMB, TSEN54, SPIRE2, PIWIL4, ZSCAN22, ICAM1, CHD9, LPIN2, SETD8, ZC3H12A, ULBP3, IL15RA, HLA-DQB2, LCP1, CHP, RUNX3, TMEM43, REEP4, MEF2D, ABL1, TMEM39A, PCBP4, PLCD1, CHST12, RASGRP1, C1orf58, C11orf63, C6orf129, FHOD1, DKFZp434F142, PIK3CG, ITPR3, BTG3, C4orf50, CNNM3, IFI16, AK1, CDK2AP1, REL, BCL2L1, MVD, TTC39C, PLEKHA2, FKBP11, EML4, FANCA, CDCA4, FUCA2, MFSD10, TBCD, CAPN2, IQGAP1, CHST11, PIK3R1, MYO5A, KIR2DL3, DLG3, MXD4, RALGDS, S1PR5, WSB2, CCR3, TIPARP, SP140, CD151, SOX13, KRTAP5-2, NF1, PEA15, PARP8, RNF166, UEVLD, LIMK1, CACNB1, TMX4, SLC6A6, LBA1, SV2A, LLGL2, IRF1, PPP2R5C, CD99, RAPGEF1, PPP4R1, OSBPL7, FOXP4, SLA2, TBC1D2B, ST7, JAZF1, GGA2, PI4K2A, CD68, LPGAT1, STX11, ZAK, FAM160B1, RORA, C8orf80, APOBEC3F, TGFBI, DNAJC1, GPR114, LRP8, CD69, CMIP, NAT13, TGFB1, FLJ00049, ANTXR2, NR4A3, IL12RB1, NTNG2, RDX, MLLT4, GPRIN3, ADCY9, CD300A, SCD5, ABI3, PTPN22, LGALS1, SYTL3, BMPR1A, TBK1, PMAIP1, RASGEF1A, GCNT1, GABARAPL1, STOM, CALHM2, ABCA2, PPP1R16B, SYNE2, PAM, C12orf75, CLCF1, MXRA7, APOBEC3C, CLSTN3, ACOT9, HIP1, LAG3, TNFAIP3, DCBLD1, KLF6, CACNB3, RNF19A, RAB27A, FADS3, DLG5, APOBEC3D, TNFRSF1B, ACTN4, TBKBP1, ATXN1, ARAP2, ARHGEF12, FAM53B, MAN1A1, FAM38A, PLXNC1, GRLF1, SRGN, HLA-DRB5, B4GALT5, WIPI1, PTPRJ, SLFN11, DUSP2, ANXA5, AHNAK, NEO1, CLIC1, EIF2C4, MAP3K5, IL2RB, PLEKHG1, MYO6, GTDC1, EDARADD, GALM, TARP, ADAM8, MSC, HNRPLL, SYT11, ATP2B4, NHSL2, MATK, ARHGAP18, SLFN12L, SPATS2L, RAB27B, PIK3R3, TP53INP1, MBOAT1, GYG1, KATNAL1, FAM46C, ZC3HAV1L, ANXA2P2, CTNNA1, NPC1, C3AR1, CRIM1, SH2D2A, ERN1, YPEL1, TBX21, SLC1A4, FASLG, PHACTR2, GALNT3, ADRB2, PIK3AP1, TLR3, PLEKHA5, DUSP10, GNAO1, PTGDR, FRMD4B, ANXA2, EOMES, CADM1, MAF, TPRG1, NBEAL2, PPP2R2B, PELO, SLC4A4, KLRF1, FOSL2, RGS2, TGFBR3, PRF1, MYO1F, GAB3, C17orf66, MICAL2, CYTH3, TOX, HLA-DRA, SYNE1, WEE1, PYHIN1, F2R, PLD1, THBS1, CD58, FAS, NETO2, CXCR6, ST6GALNAC2, DUSP4, AUTS2, C1orf21, KLRG1, TNIP3, GZMA, PRR5L, PRDM1, ST8SIA6, PLXND1, PTPRM, GFPT2, MYBL1, SLAMF7, FLJ16686, GNLY, ZEB2, CST7, IL18RAP, CCL5, KLRD1, and KLRB1. In some embodiments, the GeneSetScore (Progressively up in memory differentiation) is determined using RNA-seq, for example, single-cell RNA-seq (scRNA-seq), for example, as exemplified in Example 10 with respect to FIG. 40B. In some embodiments, the GeneSetScore (Progressively up in memory differentiation) is calculated by taking the mean log normalized gene expression value of all of the genes in the gene set.

[0487] As used herein, the term “GeneSetScore (Up TEM vs. Down TN)″ of a cell refers to a score that reflects the degree at which the cell shows an effector memory T cell (TEM) phenotype vs. a naive T cell (TN) phenotype. A higher GeneSetScore (Up TEM vs. Down TN) indicates an increasing TEM phenotype, whereas a lower GeneSetScore (Up TEM vs. Down TN) indicates an increasing TN phenotype. In some embodiments, the GeneSetScore (Up TEM vs. Down TN) is determined by measuring the expression of one or more genes that are up-regulated in TEM cells and/or down-regulated in TN cells, for example, one or more genes selected from the group consisting of MYO5A, MXD4, STK3, S1PR5, GLCCI1, CCR3, SOX13, KRTAP5-2, PEA15, PARP8, RNF166, UEVLD, LIMK1, SLC6A6, SV2A, KPNA2, OSBPL7, ST7, GGA2, PI4K2A, CD68, ZAK, RORA, TGFBI, DNAJC1, JOSD1, ZFYVE28, LRP8, OSBPL3, CMIP, NAT13, TGFB1, ANTXR2, NR4A3, RDX, ADCY9, CHN1, CD300A, SCD5, PTPN22, LGALS1, RASGEF1A, GCNT1, GLUL, ABCA2, CLDND1, PAM, CLCF1, MXRA7, CLSTN3, ACOT9, METRNL, BMPR1A, LRIG1, APOBEC3G, CACNB3, RNF19A, RAB27A, FADS3, ACTN4, TBKBP1, FAM53B, MAN1A1, FAM38A, GRLF1, B4GALT5, WIPI1, DUSP2, ANXA5, AHNAK, CLIC1, MAP3K5, ST8SIA1, TARP, ADAM8, MATK, SLFN12L, PIK3R3, FAM46C, ANXA2P2, CTNNA1, NPC1, SH2D2A, ERN1, YPEL1, TBX21, STOM, PHACTR2, GBP5, ADRB2, PIK3AP1, DUSP10, PTGDR, EOMES, MAF, TPRG1, NBEAL2, NCAPH, SLC4A4, FOSL2, RGS2, TGFBR3, MYO1F, C17orf66, CYTH3, WEE1, PYHIN1, F2R, THBS1, CD58, AUTS2, FAM129A, TNIP3, GZMA, PRR5L, PRDM1, PLXND1, PTPRM, GFPT2, MYBL1, SLAMF7, ZEB2, CST7, CCL5, GZMK, and KLRB1. In some embodiments, the GeneSetScore (Up TEM vs. Down TN) is determined using RNA-seq, for example, single-cell RNA-seq (scRNA-seq), for example, as exemplified in Example 10 with respect to FIG. 40C. In some embodiments, the GeneSetScore (Up TEM vs. Down TN) is calculated by taking the mean log normalized gene expression value of all of the genes in the gene set.

[0488] In the context of GeneSetScore values (e.g., median GeneSetScore values), when a positive GeneSetScore is reduced by 100%, the value becomes 0. When a negative GeneSetScore is increased by 100%, the value becomes 0. For example, in FIG. 39A, the median GeneSetScore of the Day 1 sample is -0.084; the median GeneSetScore of the Day9 sample is 0.035; and the median GeneSetScore of the input sample is -0.1. In FIG. 39A, increasing the median GeneSetScore of the input sample by 100% leads to a GeneSetScore value of 0; and increasing the median GeneSetScore of the input sample by 200% leads to a GeneSetScore value of 0.1. In FIG. 39A, decreasing the median GeneSetScore of the Day9 sample by 100% leads to a GeneSetScore value of 0; and decreasing the median GeneSetScore of the Day9 sample by 200% leads to a GeneSetScore value of -0.035.

[0489] As used herein, the term “bead” refers to a discrete particle with a solid surface, ranging in size from approximately 0.1 µm to several millimeters in diameter. Beads may be spherical (for example, microspheres) or have an irregular shape. Beads may comprise a variety of materials including, but not limited to, paramagnetic materials, ceramic, plastic, glass, polystyrene, methylstyrene, acrylic polymers, titanium, latex, Sepharose™, cellulose, nylon and the like. In some embodiments, the beads are relatively uniform, about 4.5 µm in diameter, spherical, superparamagnetic polystyrene beads, for example, coated, for example, covalently coupled, with a mixture of antibodies against CD3 (for example, CD3 epsilon) and CD28. In some embodiments, the beads are Dynabeads®. In some embodiments, both anti-CD3 and anti-CD28 antibodies are coupled to the same bead, mimicking stimulation of T cells by antigen presenting cells. The property of Dynabeads® and the use of Dynabeads® for cell isolation and expansion are well known in the art, for example, see, Neurauter et al., Cell isolation and expansion using Dynabeads, Adv Biochem Eng Biotechnol. 2007;106:41-73, herein incorporated by reference in its entirety.

[0490] As used herein, the term “nanomatrix” refers to a nanostructure comprising a matrix of mobile polymer chains. The nanomatrix is 1 to 500 nm, for example, 10 to 200 nm, in size. In some embodiments, the matrix of mobile polymer chains is attached to one or more agonists which provide activation signals to T cells, for example, agonist anti-CD3 and/or anti-CD28 antibodies. In some embodiments, the nanomatrix comprises a colloidal polymeric nanomatrix attached, for example, covalently attached, to an agonist of one or more stimulatory molecules and/or an agonist of one or more costimulatory molecules. In some embodiments, the agonist of one or more stimulatory molecules is a CD3 agonist (for example, an anti-CD3 agonistic antibody). In some embodiments, the agonist of one or more costimulatory molecules is a CD28 agonist (for example, an anti-CD28 agonistic antibody). In some embodiments, the nanomatrix is characterized by the absence of a solid surface, for example, as the attachment point for the agonists, such as anti-CD3 and/or anti-CD28 antibodies. In some embodiments, the nanomatrix is the nanomatrix disclosed in WO2014/048920A1 or as given in the MACS® GMP T Cell TransAct™ kit from Miltenyi Biotcc GmbH, herein incorporated by reference in their entirety. MACS® GMP T Cell TransAct™ consists of a colloidal polymeric nanomatrix covalently attached to humanized recombinant agonist antibodies against human CD3 and CD28.

[0491] Various embodiments of the compositions and methods herein are described in further detail below. Additional definitions are set out throughout the specification.

### Description

[0492] Provided herein are methods of manufacturing immune effector cells (for example, T cells or NK cells) engineered to express a CAR, for example, a CAR described herein, compositions comprising such cells, and methods of using such cells for treating a disease, such as cancer, in a subject. In some embodiments, the methods disclosed herein may manufacture immune effector cells engineered to express a CAR in less than 24 hours. Without wishing to be bound by theory, the methods provided herein preserve the undifferentiated phenotype of T cells, such as naive T cells, during the manufacturing process. These CAR-expressing cells with an undifferentiated phenotype may persist longer and/or expand better in vivo after infusion. In some embodiments, CART cells produced by the manufacturing methods provided herein comprise a higher percentage of stem cell memory T cells, compared to CART cells produced by the traditional manufacturing process, e.g., as measured using scRNA-seq (e.g., as measured using methods described in Example 10 with respect to FIG. 39A). In some embodiments, CART cells produced by the manufacturing methods provided herein comprise a higher percentage of effector T cells, compared to CART cells produced by the traditional manufacturing process, e.g., as measured using scRNA-seq (e.g., as measured using methods described in Example 10 with respect to FIG. 39B). In some embodiments, CART cells produced by the manufacturing methods provided herein better preserve the stemness of T cells, compared to CART cells produced by the traditional manufacturing process, e.g., as measured using scRNA-seq (e.g., as measured using methods described in Example 10 with respect to FIG. 39C). In some embodiments, CART cells produced by the manufacturing methods provided herein show a lower level of hypoxia, compared to CART cells produced by the traditional manufacturing process, e.g., as measured using scRNA-seq (e.g., as measured using methods described in Example 10 with respect to FIG. 39D). In some embodiments, CART cells produced by the manufacturing methods provided herein show a lower level of autophagy, compared to CART cells produced by the traditional manufacturing process, e.g., as measured using scRNA-seq (e.g., as measured using methods described in Example 10 with respect to FIG. 39E).

[0493] In some embodiments, the methods disclosed herein do not involve using a bead, such as Dynabeads® (for example, CD3/CD28 Dynabeads®), and do not involve a de-beading step. In some embodiments, the CART cells manufactured by the methods disclosed herein may be administered to a subject with minimal ex vivo expansion, for example, less than 1 day, less than 12 hours, less than 8 hours, less than 6 hours, less than 4 hours, less than 3 hours, less than 2 hours, less than 1 hour, or no ex vivo expansion. Accordingly, the methods described herein provide a fast manufacturing process of making improved CAR-expressing cell products for use in treating a disease in a subject.

### Cytokine Process

[0494] In some embodiments, the present disclosure provides methods of making a population of cells (for example, T cells) that express a chimeric antigen receptor (CAR) comprising: (1) contacting a population of cells with a cytokine chosen from IL-2, IL-7, IL-15, IL-21, IL-6, or a combination thereof, (2) contacting the population of cells (for example, T cells) with a nucleic acid molecule (for example, a DNA or RNA molecule) encoding the CAR, thereby providing a population of cells (for example, T cells) comprising the nucleic acid molecule, and (3) harvesting the population of cells (for example, T cells) for storage (for example, reformulating the population of cells in cryopreservation media) or administration, wherein: (a) step (2) is performed together with step (1) or no later than 5 hours after the beginning of step (1), for example, no later than 1, 2, 3, 4, or 5 hours after the beginning of step (1), and step (3) is performed no later than 26 hours after the beginning of step (1), for example, no later than 22, 23, or 24 hours after the beginning of step (1), for example, no later than 24 hours after the beginning of step (1), or (b) the population of cells from step (3) are not expanded, or expanded by no more than 5, 10, 15, 20, 25, 30, 35, or 40%, for example, no more than 10%, for example, as assessed by the number of living cells, compared to the population of cells at the beginning of step (1). In some embodiments, the nucleic acid molecule in step (2) is a DNA molecule. In some embodiments, the nucleic acid molecule in step (2) is an RNA molecule. In some embodiments, the nucleic acid molecule in step (2) is on a viral vector, for example, a viral vector chosen from a lentivirus vector, an adenoviral vector, or a retrovirus vector. In some embodiments, the nucleic acid molecule in step (2) is on a non-viral vector. In some embodiments, the nucleic acid molecule in step (2) is on a plasmid. In some embodiments, the nucleic acid molecule in step (2) is not on any vector. In some embodiments, step (2) comprises transducing the population of cells (for example, T cells) with a viral vector comprising a nucleic acid molecule encoding the CAR. In some embodiments, step (2) further comprises contacting the population of cells (for example, T cells) with shRNA that targets Tet2 comprising (A) a sense strand comprising a Tet2 target sequence and (B) an antisense strand complementary to the sense strand in whole or in part or a vector encoding the shRNA.

[0495] In some embodiments, sense strand comprises the Tet2 target sequence GGGTAAGCCAAGAAAGAAA (SEQ ID NO: 418). In some embodiments, the anti-sense strand comprises the reverse complement thereof, i.e. TTTCTTTCTTGGCTTACCC (SEQ ID NO: 419). In some embodiments, the vector encoding the shRNA is the same or different from the vector encoding the CAR. In some embodiments, the vector encoding the shRNA sequence comprises promoter (such as but not limited to a U6 promoter), a sense strand comprising a Tet2 target sequence, a loop, an anti-sense strand complementary to the sense strand in whole or in part, and, optionally, a polyT tail, e.g. the sequences in Table 29.

[0496] In some embodiments, the population of cells (for example, T cells) is collected from an apheresis sample (for example, a leukapheresis sample) from a subject.

[0497] In some embodiments, the apheresis sample (for example, a leukapheresis sample) is collected from the subject and shipped as a frozen sample (for example, a cryopreserved sample) to a cell manufacturing facility. The frozen apheresis sample is then thawed, and T cells (for example, CD4+ T cells and/or CD8+ T cells) are selected from the apheresis sample, for example, using a cell sorting machine (for example, a CliniMACS® Prodigy® device). The selected T cells (for example, CD4+ T cells and/or CD8+ T cells) are then seeded for CART manufacturing using the cytokine process described herein. In some embodiments, at the end of the cytokine process, the CAR T cells are cryopreserved and later thawed and administered to the subject. In some embodiments, the selected T cells (for example, CD4+ T cells and/or CD8+ T cells) undergo one or more rounds of freeze-thaw before being seeded for CART manufacturing.

[0498] In some embodiments, the apheresis sample (for example, a leukapheresis sample) is collected from the subject and shipped as a fresh product (for example, a product that is not frozen) to a cell manufacturing facility. T cells (for example, CD4+ T cells and/or CD8+ T cells) are selected from the apheresis sample, for example, using a cell sorting machine (for example, a CliniMACS® Prodigy® device). The selected T cells (for example, CD4+ T cells and/or CD8+ T cells) are then seeded for CART manufacturing using the cytokine process described herein. In some embodiments, the selected T cells (for example, CD4+ T cells and/or CD8+ T cells) undergo one or more rounds of freeze-thaw before being seeded for CART manufacturing.

[0499] In some embodiments, the apheresis sample (for example, a leukapheresis sample) is collected from the subject. T cells (for example, CD4+ T cells and/or CD8+ T cells) are selected from the apheresis sample, for example, using a cell sorting machine (for example, a CliniMACS® Prodigy® device). The selected T cells (for example, CD4+ T cells and/or CD8+ T cells) are then shipped as a frozen sample (for example, a cryopreserved sample) to a cell manufacturing facility. The selected T cells (for example, CD4+ T cells and/or CD8+ T cells) are later thawed and seeded for CART manufacturing using the cytokine process described herein.

[0500] In some embodiments, after cells (for example, T cells) are seeded, one or more cytokines (for example, one or more cytokines chosen from IL-2, IL-7, IL-15 (for example, hetIL-15 (IL15/sIL-15Ra)), IL-21, or IL-6 (for example, IL-6/sIL-6R)) as well as vectors (for example, lentiviral vectors) encoding a CAR are added to the cells. After incubation for 20-24 hours, the cells are washed and formulated for storage or administration.

[0501] Different from traditional CART manufacturing approaches, the cytokine process provided herein does not involve CD3 and/or CD28 stimulation, or ex vivo T cell expansion. T cells that are contacted with anti-CD3 and anti-CD28 antibodies and expanded extensively ex vivo tend to show differentiation towards a central memory phenotype. Without wishing to be bound by theory, the cytokine process provided herein preserves or increases the undifferentiated phenotype of T cells during CART manufacturing, generating a CART product that may persist longer after being infused into a subject.

[0502] In some embodiments, the population of cells is contacted with one or more cytokines (for example, one or more cytokines chosen from IL-2, IL-7, IL-15 (for example, hetIL-15 (IL15/sIL-15Ra)), IL-21, or IL-6 (for example, IL-6/sIL-6Ra).

[0503] In some embodiments, the population of cells is contacted with IL-2. In some embodiments, the population of cells is contacted with IL-7. In some embodiments, the population of cells is contacted with IL-15 (for example, hetIL-15 (IL15/sIL-15Ra)). In some embodiments, the population of cells is contacted with IL-21. In some embodiments, the population of cells is contacted with IL-6 (for example, IL-6/sIL-6Ra). In some embodiments, the population of cells is contacted with IL-2 and IL-7. In some embodiments, the population of cells is contacted with IL-2 and IL-15 (for example, hetIL-15 (IL15/sIL-15Ra)). In some embodiments, the population of cells is contacted with IL-2 and IL-21. In some embodiments, the population of cells is contacted with IL-2 and IL-6 (for example, IL-6/sIL-6Ra). In some embodiments, the population of cells is contacted with IL-7 and IL-15 (for example, hetIL-15 (IL15/sIL-15Ra)). In some embodiments, the population of cells is contacted with IL-7 and IL-21. In some embodiments, the population of cells is contacted with IL-7 and IL-6 (for example, IL-6/sIL-6Ra). In some embodiments, the population of cells is contacted with IL-15 (for example, hetIL-15 (IL15/sIL-15Ra)) and IL-21. In some embodiments, the population of cells is contacted with IL-15 (for example, hetIL-15 (IL15/sIL-15Ra)) and IL-6 (for example, IL-6/sIL-6Ra). In some embodiments, the population of cells is contacted with IL-21 and IL-6 (for example, IL-6/sIL-6Ra). In some embodiments, the population of cells is contacted with IL-7, IL-15 (for example, hetIL-15 (IL15/sIL-15Ra)), and IL-21. In some embodiments, the population of cells is further contacted with a LSD1 inhibitor. In some embodiments, the population of cells is further contacted with a MALT1 inhibitor.

[0504] In some embodiments, the population of cells is contacted with 20, 30, 40, 50, 60, 70, 80, 90, 100, 110, 120, 130, 140, 150, 160, 170, 180, 190, 200, 210, 220, 230, 240, 250, 260, 270, 280, 290, or 300 U/ml of IL-2. In some embodiments, the population of cells is contacted with 1, 2, 3, 4, 5, 6, 7, 8, 9, 10, 11, 12, 13, 14, 15, 16, 17, 18, 19, or 20 ng/ml of IL-7. In some embodiments, the population of cells is contacted with 1, 2, 3, 4, 5, 6, 7, 8, 9, 10, 11, 12, 13, 14, 15, 16, 17, 18, 19, or 20 ng/ml of IL-15.

[0505] In some embodiments, the population of cells is contacted with a nucleic acid molecule encoding a CAR. In some embodiments, the population of cells is transduced with a DNA molecule encoding a CAR.

[0506] In some embodiments, contacting the population of cells with the nucleic acid molecule encoding the CAR occurs simultaneously with contacting the population of cells with the one or more cytokines described above. In some embodiments, contacting the population of cells with the nucleic acid molecule encoding the CAR occurs no later than 1, 1.5, 2, 2.5, 3, 3.5, 4, 4.5, 5, 5.5, 6, 6.5, 7, 7.5, 8, 8.5, 9, 9.5 or 10 hours after the beginning of contacting the population of cells with the one or more cytokines described above. In some embodiments, contacting the population of cells with the nucleic acid molecule encoding the CAR occurs no later than 5 hours after the beginning of contacting the population of cells with the one or more cytokines described above. In some embodiments, contacting the population of cells with the nucleic acid molecule encoding the CAR occurs no later than 4 hours after the beginning of contacting the population of cells with the one or more cytokines described above. In some embodiments, contacting the population of cells with the nucleic acid molecule encoding the CAR occurs no later than 3 hours after the beginning of contacting the population of cells with the one or more cytokines described above. In some embodiments, contacting the population of cells with the nucleic acid molecule encoding the CAR occurs no later than 2 hours after the beginning of contacting the population of cells with the one or more cytokines described above. In some embodiments, contacting the population of cells with the nucleic acid molecule encoding the CAR occurs no later than 1 hour after the beginning of contacting the population of cells with the one or more cytokines described above.

[0507] In some embodiments, the population of cells is harvested for storage or administration.

[0508] In some embodiments, the population of cells is harvested for storage or administration no later than 72, 60, 48, 36, 32, 31, 30, 29, 28, 27, 26, 25, 24, 23, 22, 21, 20, 19, or 18 hours after the beginning of contacting the population of cells with the one or more cytokines described above. In some embodiments, the population of cells is harvested for storage or administration no later than 26 hours after the beginning of contacting the population of cells with the one or more cytokines described above. In some embodiments, the population of cells is harvested for storage or administration no later than 25 hours after the beginning of contacting the population of cells with the one or more cytokines described above. In some embodiments, the population of cells is harvested for storage or administration no later than 24 hours after the beginning of contacting the population of cells with the one or more cytokines described above. In some embodiments, the population of cells is harvested for storage or administration no later than 23 hours after the beginning of contacting the population of cells with the one or more cytokines described above. In some embodiments, the population of cells is harvested for storage or administration no later than 22 hours after the beginning of contacting the population of cells with the one or more cytokines described above.

[0509] In some embodiments, the population of cells is not expanded ex vivo.

[0510] In some embodiments, the population of cells is expanded by no more than 5, 6, 7, 8, 9, 10, 11, 12, 13, 14, 15, 16, 17, 18, 19, 20, 25, 30, 35, 40, 45, 50, 55, or 60%, for example, as assessed by the number of living cells, compared to the population of cells before it is contacted with the one or more cytokines described above. In some embodiments, the population of cells is expanded by no more than 5%, for example, as assessed by the number of living cells, compared to the population of cells before it is contacted with the one or more cytokines described above. In some embodiments, the population of cells is expanded by no more than 10%, for example, as assessed by the number of living cells, compared to the population of cells before it is contacted with the one or more cytokines described above. In some embodiments, the population of cells is expanded by no more than 15%, for example, as assessed by the number of living cells, compared to the population of cells before it is contacted with the one or more cytokines described above. In some embodiments, the population of cells is expanded by no more than 20%, for example, as assessed by the number of living cells, compared to the population of cells before it is contacted with the one or more cytokines described above. In some embodiments, the population of cells is expanded by no more than 25%, for example, as assessed by the number of living cells, compared to the population of cells before it is contacted with the one or more cytokines described above. In some embodiments, the population of cells is expanded by no more than 30%, for example, as assessed by the number of living cells, compared to the population of cells before it is contacted with the one or more cytokines described above. In some embodiments, the population of cells is expanded by no more than 35%, for example, as assessed by the number of living cells, compared to the population of cells before it is contacted with the one or more cytokines described above. In some embodiments, the population of cells is expanded by no more than 40%, for example, as assessed by the number of living cells, compared to the population of cells before it is contacted with the one or more cytokines described above.

[0511] In some embodiments, the population of cells is expanded by no more than 1, 1.5, 2, 2.5, 3, 3.5, 4, 4.5, 5, 6, 7, 8, 9, 10, 11, 12, 16, 20, 24, 36, or 48 hours, for example, as assessed by the number of living cells, compared to the population of cells before it is contacted with the one or more cytokines described above.

[0512] In some embodiments, the population of cells is not contacted in vitro with an agent that stimulates a CD3/TCR complex (for example, an anti-CD3 antibody) and/or an agent that stimulates a costimulatory molecule and/or growth factor receptor on the surface of the cells (for example, an anti-CD28 antibody), or if contacted, the contacting step is less than 1, 1.5, 2, 2.5, 3, 3.5, 4, 4.5, or 5 hours.

[0513] In some embodiments, the population of cells is contacted in vitro with an agent that stimulates a CD3/TCR complex (for example, an anti-CD3 antibody) and/or an agent that stimulates a costimulatory molecule and/or growth factor receptor on the surface of the cells (for example, an anti-CD28 antibody) for 20, 21, 22, 23, 24, 25, 26, 27, or 28 hours.

[0514] In some embodiments, the population of cells manufactured using the cytokine process provided herein shows a higher percentage of naive cells among CAR-expressing cells (for example, at least 5, 6, 7, 8, 9, 10, 11, 12, 13, 14, 15, 16, 17, 18, 19, 20, 25, 30, 35, 40, 45, 50, 55, or 60% higher), compared with cells made by an otherwise similar method which further comprises contacting the population of cells with, for example, an agent that binds a CD3/TCR complex (for example, an anti-CD3 antibody) and/or an agent that binds a costimulatory molecule on the surface of the cells (for example, an anti-CD28 antibody).

[0515] In some embodiments, the cytokine process provided herein is conducted in cell media comprising no more than 0, 0.5, 1, 1.5, 2, 2.5, 3, 3.5, 4, 4.5, 5, 5.5, 6, 6.5, 7, 7.5, or 8% serum. In some embodiments, the cytokine process provided herein is conducted in cell media comprising a LSD1 inhibitor, a MALT1 inhibitor, or a combination thereof.

### Activation Process

[0516] In some embodiments, the present disclosure provides methods of making a population of cells (for example, T cells) that express a chimeric antigen receptor (CAR) comprising: (i) contacting a population of cells (for example, T cells, for example, T cells isolated from a frozen or fresh leukapheresis product) with (A) an agent that stimulates a CD3/TCR complex and/or (B) an agent that stimulates a costimulatory molecule and/or growth factor receptor on the surface of the cells; (ii) contacting the population of cells (for example, T cells) with a nucleic acid molecule (for example, a DNA or RNA molecule) encoding the CAR, thereby providing a population of cells (for example, T cells) comprising the nucleic acid molecule, and (iii) harvesting the population of cells (for example, T cells) for storage (for example, reformulating the population of cells in cryopreservation media) or administration, wherein: (a) step (ii) is performed together with step (i) or no later than 20 hours after the beginning of step (i), for example, no later than 12, 13, 14, 15, 16, 17, or 18 hours after the beginning of step (i), for example, no later than 18 hours after the beginning of step (i), and step (iii) is performed no later than 26 hours after the beginning of step (i), for example, no later than 22, 23, or 24 hours after the beginning of step (i), for example, no later than 24 hours after the beginning of step (i); (b) step (ii) is performed together with step (i) or no later than 20 hours after the beginning of step (i), for example, no later than 12, 13, 14, 15, 16, 17, or 18 hours after the beginning of step (i), for example, no later than 18 hours after the beginning of step (i), and step (iii) is performed no later than 30, 36, or 48 hours after the beginning of step (ii), for example, no later than 22, 23, 24, 25, 26, 27, 28, 29, 30, 31, 32, 33, 34, 35, 36, 37, 38, 39, 40, 41, 42, 43, 44, 45, 46, 47, or 48 hours after the beginning of step (ii); or (c) the population of cells from step (iii) are not expanded, or expanded by no more than 5, 10, 15, 20, 25, 30, 35, or 40%, for example, no more than 10%, for example, as assessed by the number of living cells, compared to the population of cells at the beginning of step (i). In some embodiments, the nucleic acid molecule in step (ii) is a DNA molecule. In some embodiments, the nucleic acid molecule in step (ii) is an RNA molecule. In some embodiments, the nucleic acid molecule in step (ii) is on a viral vector, for example, a viral vector chosen from a lentivirus vector, an adenoviral vector, or a retrovirus vector. In some embodiments, the nucleic acid molecule in step (ii) is on a non-viral vector. In some embodiments, the nucleic acid molecule in step (ii) is on a plasmid. In some embodiments, the nucleic acid molecule in step (ii) is not on any vector. In some embodiments, step (ii) comprises transducing the population of cells (for example, T cells) a viral vector comprising a nucleic acid molecule encoding the CAR. In some embodiments, step (2) further comprises contacting the population of cells (for example, T cells) with shRNA that targets Tet2 comprising (A) a sense strand comprising a Tet2 target sequence and (B) an antisense strand complementary to the sense strand in whole or in part or a vector encoding the shRNA. In some embodiments, sense strand comprises the Tet2 target sequence GGGTAAGCCAAGAAAGAAA. In some embodiments, the anti-sense strand comprises the reverse complement thereof, i.e. TTTCTTTCTTGGCTTACCC. In some embodiments, the vector encoding the shRNA is the same or different from the vector encoding the CAR. In some embodiments, the vector encoding the shRNA sequence comprises promoter (such as but not limited to a U6 promoter), a sense strand comprising a Tet2 target sequence, a loop, an anti-sense strand complementary to the sense strand in whole or in part, and, optionally, a polyT tail, e.g. the sequences in Table 29.

[0517] In some embodiments, the population of cells (for example, T cells) is collected from an apheresis sample (for example, a leukapheresis sample) from a subject.

[0518] In some embodiments, the apheresis sample (for example, a leukapheresis sample) is collected from the subject and shipped as a frozen sample (for example, a cryopreserved sample) to a cell manufacturing facility. Then the frozen apheresis sample is thawed, and T cells (for example, CD4+ T cells and/or CD8+ T cells) are selected from the apheresis sample, for example, using a cell sorting machine (for example, a CliniMACS® Prodigy® device). The selected T cells (for example, CD4+ T cells and/or CD8+ T cells) are then seeded for CART manufacturing using the activation process described herein. In some embodiments, the selected T cells (for example, CD4+ T cells and/or CD8+ T cells) undergo one or more rounds of freeze-thaw before being seeded for CART manufacturing.

[0519] In some embodiments, the apheresis sample (for example, a leukapheresis sample) is collected from the subject and shipped as a fresh product (for example, a product that is not frozen) to a cell manufacturing facility. T cells (for example, CD4+ T cells and/or CD8+ T cells) are selected from the apheresis sample, for example, using a cell sorting machine (for example, a CliniMACS® Prodigy® device). The selected T cells (for example, CD4+ T cells and/or CD8+ T cells) are then seeded for CART manufacturing using the activation process described herein. In some embodiments, the selected T cells (for example, CD4+ T cells and/or CD8+ T cells) undergo one or more rounds of freeze-thaw before being seeded for CART manufacturing.

[0520] In some embodiments, the apheresis sample (for example, a leukapheresis sample) is collected from the subject. T cells (for example, CD4+ T cells and/or CD8+ T cells) are selected from the apheresis sample, for example, using a cell sorting machine (for example, a CliniMACS® Prodigy® device). The selected T cells (for example, CD4+ T cells and/or CD8+ T cells) are then shipped as a frozen sample (for example, a cryopreserved sample) to a cell manufacturing facility. The selected T cells (for example, CD4+ T cells and/or CD8+ T cells) are later thawed and seeded for CART manufacturing using the activation process described herein.

[0521] In some embodiments, cells (for example, T cells) are contacted with anti-CD3 and anti-CD28 antibodies for, for example, 12 hours, followed by transduction with a vector (for example, a lentiviral vector) encoding a CAR. 24 hours after culture initiation, the cells are washed and formulated for storage or administration.

[0522] Without wishing to be bound by theory, brief CD3 and CD28 stimulation may promote efficient transduction of self-renewing T cells. Compared to traditional CART manufacturing approaches, the activation process provided herein does not involve prolonged ex vivo expansion. Similar to the cytokine process, the activation process provided herein also preserves undifferentiated T cells during CART manufacturing.

[0523] In some embodiments, the population of cells is contacted with (A) an agent that stimulates a CD3/TCR complex and/or (B) an agent that stimulates a costimulatory molecule and/or growth factor receptor on the surface of the cells.

[0524] In some embodiments, the agent that stimulates a CD3/TCR complex is an agent that stimulates CD3. In some embodiments, the agent that stimulates a costimulatory molecule and/or growth factor receptor is an agent that stimulates CD28, ICOS, CD27, HVEM, LIGHT, CD40, 4-1BB, OX40, DR3, GITR, CD30, TIM1, CD2, CD226, or any combination thereof. In some embodiments, the agent that stimulates a costimulatory molecule and/or growth factor receptor is an agent that stimulates CD28. In some embodiments, the agent that stimulates a CD3/TCR complex is chosen from an antibody (for example, a single-domain antibody (for example, a heavy chain variable domain antibody), a peptibody, a Fab fragment, or a scFv), a small molecule, or a ligand (for example, a naturally-existing, recombinant, or chimeric ligand). In some embodiments, the agent that stimulates a costimulatory molecule and/or growth factor receptor is chosen from an antibody (for example, a single-domain antibody (for example, a heavy chain variable domain antibody), a peptibody, a Fab fragment, or a scFv), a small molecule, or a ligand (for example, a naturally-existing, recombinant, or chimeric ligand). In some embodiments, the agent that stimulates a CD3/TCR complex does not comprise a bead. In some embodiments, the agent that stimulates a costimulatory molecule and/or growth factor receptor does not comprise a bead. In some embodiments, the agent that stimulates a CD3/TCR complex comprises an anti-CD3 antibody. In some embodiments, the agent that stimulates a costimulatory molecule and/or growth factor receptor comprises an anti-CD28 antibody. In some embodiments, the agent that stimulates a CD3/TCR complex comprises an anti-CD3 antibody covalently attached to a colloidal polymeric nanomatrix. In some embodiments, the agent that stimulates CD3 comprises one or more of a CD3 or TCR antigen binding domain, such as but not limited to an anti-CD3 or anti-TCR antibody or an antibody fragment comprising one or more CDRs, heavy chain, and/or light chain thereof -such as but not limited to an anti-CD3 or anti-TCR antibody provided in Table 27. In some embodiments, the agent that stimulates a costimulatory molecule and/or growth factor receptor comprises an anti-CD28 antibody covalently attached to a colloidal polymeric nanomatrix. In some embodiments, the agent that stimulates a costimulatory molecule and/or growth factor receptor is an agent that stimulates CD28, ICOS, CD27, CD25, 4-1BB, IL6RA, IL6RB, or CD2. In some embodiments, the agent that stimulates a costimulatory molecule and/or growth factor receptor comprises one or more of a CD28, ICOS, CD27, CD25, 4-1BB, IL6RB, and/or CD2 antigen binding domain, such as but not limited to an anti- CD28, anti-ICOS, anti-CD27, anti-CD25, anti-4-1BB, anti-IL6RA, anti-IL6RB, or anti-CD2 antibody or an antibody fragment comprising one or more CDRs, heavy chain, and/or light chain thereof - such as but not limited to an anti- CD28, anti-ICOS, anti-CD27, anti-CD25, anti-4-1BB, anti-IL6RA, anti-IL6RB, or anti-CD2 antibody provided in Table 27. In some embodiments, the agent that stimulates a CD3/TCR complex and the agent that stimulates a costimulatory molecule and/or growth factor receptor comprise T Cell TransAct™. In some embodiments, the agent that stimulates a CD3/TCR complex and the agent that stimulates a costimulatory molecule and/or growth factor receptor are comprised in a multispecific binding molecule. In some embodiments, the multispecific binding molecule comprises a CD3 antigen binding domain and a CD28 or CD2 antigen binding domain. In some embodiments, the multispecific binding molecules comprise one or more heavy and/or light chains - such as but not limited to the heavy and/or light chains provided in Table 28. In some embodiments, the multispecific binding molecule comprises a bispecific antibody. In some embodiments, the bispecific antibody is configured in any one of the schema provided in FIG. 50A. In some embodiments, the bispecific antibody is monovalent or bivalent. In some embodiments, the bispecific antibody comprises an Fc region. In some embodiments, the Fc region of the bispecific antibody is silenced. In some embodiments, the multispecific binding molecule comprises a plurality of bispecific antibodies. In some embodiments, one or more of the plurality of bispecific antibodies is monovalent. In some embodiments, one or more of the plurality of bispecific antibodies comprises an Fc region. In some embodiments, the Fc region of the one or more of the plurality of bispecific antibodies is silenced. In some embodiments, one or more of the plurality of bispecific antibodies are conjugated together into a multimer. In some embodiments, the multimer is configured in any one of the schema provided in FIG. 50B.

[0525] In some embodiments, the matrix comprises or consists of a polymeric, for example, biodegradable or biocompatible inert material, for example, which is non-toxic to cells. In some embodiments, the matrix is composed of hydrophilic polymer chains, which obtain maximal mobility in aqueous solution due to hydration of the chains. In some embodiments, the mobile matrix may be of collagen, purified proteins, purified peptides, polysaccharides, glycosaminoglycans, or extracellular matrix compositions. A polysaccharide may include for example, cellulose ethers, starch, gum arabic, agarose, dextran, chitosan, hyaluronic acid, pectins, xanthan, guar gum or alginate. Other polymers may include polyesters, polyethers, polyacrylates, polyacrylamides, polyamines, polyethylene imines, polyquaternium polymers, polyphosphazenes, polyvinylalcohols, polyvinylacetates, polyvinylpyrrolidones, block copolymers, or polyurethanes. In some embodiments, the mobile matrix is a polymer of dextran.

[0526] In some embodiments, the population of cells is contacted with a nucleic acid molecule encoding a CAR. In some embodiments, the population of cells is transduced with a DNA molecule encoding a CAR.

[0527] In some embodiments, contacting the population of cells with the nucleic acid molecule encoding the CAR occurs simultaneously with contacting the population of cells with the agent that stimulates a CD3/TCR complex and/or the agent that stimulates a costimulatory molecule and/or growth factor receptor on the surface of the cells described above. In some embodiments, contacting the population of cells with the nucleic acid molecule encoding the CAR occurs no later than 30, 29, 28, 27, 26, 25, 24, 23, 22, 21, 20, 19, 18, 17, 16, 15, 14, 13, 12, 11, 10, 9, 8, 7, 6, 5, 4, 3, 2, 1, or 0.5 hours after the beginning of contacting the population of cells with the agent that stimulates a CD3/TCR complex and/or the agent that stimulates a costimulatory molecule and/or growth factor receptor on the surface of the cells described above. In some embodiments, contacting the population of cells with the nucleic acid molecule encoding the CAR occurs no later than 20 hours after the beginning of contacting the population of cells with the agent that stimulates a CD3/TCR complex and/or the agent that stimulates a costimulatory molecule and/or growth factor receptor on the surface of the cells described above. In some embodiments, contacting the population of cells with the nucleic acid molecule encoding the CAR occurs no later than 19 hours after the beginning of contacting the population of cells with the agent that stimulates a CD3/TCR complex and/or the agent that stimulates a costimulatory molecule and/or growth factor receptor on the surface of the cells described above. In some embodiments, contacting the population of cells with the nucleic acid molecule encoding the CAR occurs no later than 18 hours after the beginning of contacting the population of cells with the agent that stimulates a CD3/TCR complex and/or the agent that stimulates a costimulatory molecule and/or growth factor receptor on the surface of the cells described above. In some embodiments, contacting the population of cells with the nucleic acid molecule encoding the CAR occurs no later than 17 hours after the beginning of contacting the population of cells with the agent that stimulates a CD3/TCR complex and/or the agent that stimulates a costimulatory molecule and/or growth factor receptor on the surface of the cells described above. In some embodiments, contacting the population of cells with the nucleic acid molecule encoding the CAR occurs no later than 16 hours after the beginning of contacting the population of cells with the agent that stimulates a CD3/TCR complex and/or the agent that stimulates a costimulatory molecule and/or growth factor receptor on the surface of the cells described above. In some embodiments, contacting the population of cells with the nucleic acid molecule encoding the CAR occurs no later than 15 hours after the beginning of contacting the population of cells with the agent that stimulates a CD3/TCR complex and/or the agent that stimulates a costimulatory molecule and/or growth factor receptor on the surface of the cells described above. In some embodiments, contacting the population of cells with the nucleic acid molecule encoding the CAR occurs no later than 14 hours after the beginning of contacting the population of cells with the agent that stimulates a CD3/TCR complex and/or the agent that stimulates a costimulatory molecule and/or growth factor receptor on the surface of the cells described above. In some embodiments, contacting the population of cells with the nucleic acid molecule encoding the CAR occurs no later than 14 hours after the beginning of contacting the population of cells with the agent that stimulates a CD3/TCR complex and/or the agent that stimulates a costimulatory molecule and/or growth factor receptor on the surface of the cells described above. In some embodiments, contacting the population of cells with the nucleic acid molecule encoding the CAR occurs no later than 13 hours after the beginning of contacting the population of cells with the agent that stimulates a CD3/TCR complex and/or the agent that stimulates a costimulatory molecule and/or growth factor receptor on the surface of the cells described above. In some embodiments, contacting the population of cells with the nucleic acid molecule encoding the CAR occurs no later than 12 hours after the beginning of contacting the population of cells with the agent that stimulates a CD3/TCR complex and/or the agent that stimulates a costimulatory molecule and/or growth factor receptor on the surface of the cells described above. In some embodiments, contacting the population of cells with the nucleic acid molecule encoding the CAR occurs no later than 11 hours after the beginning of contacting the population of cells with the agent that stimulates a CD3/TCR complex and/or the agent that stimulates a costimulatory molecule and/or growth factor receptor on the surface of the cells described above. In some embodiments, contacting the population of cells with the nucleic acid molecule encoding the CAR occurs no later than 10 hours after the beginning of contacting the population of cells with the agent that stimulates a CD3/TCR complex and/or the agent that stimulates a costimulatory molecule and/or growth factor receptor on the surface of the cells described above. In some embodiments, contacting the population of cells with the nucleic acid molecule encoding the CAR occurs no later than 9 hours after the beginning of contacting the population of cells with the agent that stimulates a CD3/TCR complex and/or the agent that stimulates a costimulatory molecule and/or growth factor receptor on the surface of the cells described above. In some embodiments, contacting the population of cells with the nucleic acid molecule encoding the CAR occurs no later than 8 hours after the beginning of contacting the population of cells with the agent that stimulates a CD3/TCR complex and/or the agent that stimulates a costimulatory molecule and/or growth factor receptor on the surface of the cells described above. In some embodiments, contacting the population of cells with the nucleic acid molecule encoding the CAR occurs no later than 7 hours after the beginning of contacting the population of cells with the agent that stimulates a CD3/TCR complex and/or the agent that stimulates a costimulatory molecule and/or growth factor receptor on the surface of the cells described above. In some embodiments, contacting the population of cells with the nucleic acid molecule encoding the CAR occurs no later than 6 hours after the beginning of contacting the population of cells with the agent that stimulates a CD3/TCR complex and/or the agent that stimulates a costimulatory molecule and/or growth factor receptor on the surface of the cells described above. In some embodiments, contacting the population of cells with the nucleic acid molecule encoding the CAR occurs no later than 5 hours after the beginning of contacting the population of cells with the agent that stimulates a CD3/TCR complex and/or the agent that stimulates a costimulatory molecule and/or growth factor receptor on the surface of the cells described above. In some embodiments, contacting the population of cells with the nucleic acid molecule encoding the CAR occurs no later than 4 hours after the beginning of contacting the population of cells with the agent that stimulates a CD3/TCR complex and/or the agent that stimulates a costimulatory molecule and/or growth factor receptor on the surface of the cells described above. In some embodiments, contacting the population of cells with the nucleic acid molecule encoding the CAR occurs no later than 3 hours after the beginning of contacting the population of cells with the agent that stimulates a CD3/TCR complex and/or the agent that stimulates a costimulatory molecule and/or growth factor receptor on the surface of the cells described above. In some embodiments, contacting the population of cells with the nucleic acid molecule encoding the CAR occurs no later than 2 hours after the beginning of contacting the population of cells with the agent that stimulates a CD3/TCR complex and/or the agent that stimulates a costimulatory molecule and/or growth factor receptor on the surface of the cells described above. In some embodiments, contacting the population of cells with the nucleic acid molecule encoding the CAR occurs no later than 1 hour after the beginning of contacting the population of cells with the agent that stimulates a CD3/TCR complex and/or the agent that stimulates a costimulatory molecule and/or growth factor receptor on the surface of the cells described above. In some embodiments, contacting the population of cells with the nucleic acid molecule encoding the CAR occurs no later than 30 minutes after the beginning of contacting the population of cells with the agent that stimulates a CD3/TCR complex and/or the agent that stimulates a costimulatory molecule and/or growth factor receptor on the surface of the cells described above.

[0528] In some embodiments, the population of cells is harvested for storage or administration.

[0529] In some embodiments, the population of cells is harvested for storage or administration no later than 72, 60, 48, 36, 32, 31, 30, 29, 28, 27, 26, 25, 24, 23, 22, 21, 20, 19, or 18 hours after the beginning of contacting the population of cells with the agent that stimulates a CD3/TCR complex and/or the agent that stimulates a costimulatory molecule and/or growth factor receptor on the surface of the cells described above. In some embodiments, the population of cells is harvested for storage or administration no later than 26 hours after the beginning of contacting the population of cells with the agent that stimulates a CD3/TCR complex and/or the agent that stimulates a costimulatory molecule and/or growth factor receptor on the surface of the cells described above. In some embodiments, the population of cells is harvested for storage or administration no later than 25 hours after the beginning of contacting the population of cells with the agent that stimulates a CD3/TCR complex and/or the agent that stimulates a costimulatory molecule and/or growth factor receptor on the surface of the cells described above. In some embodiments, the population of cells is harvested for storage or administration no later than 24 hours after the beginning of contacting the population of cells with the agent that stimulates a CD3/TCR complex and/or the agent that stimulates a costimulatory molecule and/or growth factor receptor on the surface of the cells described above. In some embodiments, the population of cells is harvested for storage or administration no later than 23 hours after the beginning of contacting the population of cells with the agent that stimulates a CD3/TCR complex and/or the agent that stimulates a costimulatory molecule and/or growth factor receptor on the surface of the cells described above. In some embodiments, the population of cells is harvested for storage or administration no later than 22 hours after the beginning of contacting the population of cells with the agent that stimulates a CD3/TCR complex and/or the agent that stimulates a costimulatory molecule and/or growth factor receptor on the surface of the cells described above.

[0530] In some embodiments, the population of cells is not expanded ex vivo.

[0531] In some embodiments, the population of cells is expanded by no more than 5, 6, 7, 8, 9, 10, 11, 12, 13, 14, 15, 16, 17, 18, 19, 20, 25, 30, 35, 40, 45, 50, 55, or 60%, for example, as assessed by the number of living cells, compared to the population of cells before it is contacted with the agent that stimulates a CD3/TCR complex and/or the agent that stimulates a costimulatory molecule and/or growth factor receptor on the surface of the cells described above. In some embodiments, the population of cells is expanded by no more than 5%, for example, as assessed by the number of living cells, compared to the population of cells before it is contacted with the agent that stimulates a CD3/TCR complex and/or the agent that stimulates a costimulatory molecule and/or growth factor receptor on the surface of the cells described above. In some embodiments, the population of cells is expanded by no more than 10%, for example, as assessed by the number of living cells, compared to the population of cells before it is contacted with the agent that stimulates a CD3/TCR complex and/or the agent that stimulates a costimulatory molecule and/or growth factor receptor on the surface of the cells described above. In some embodiments, the population of cells is expanded by no more than 15%, for example, as assessed by the number of living cells, compared to the population of cells before it is contacted with the agent that stimulates a CD3/TCR complex and/or the agent that stimulates a costimulatory molecule and/or growth factor receptor on the surface of the cells described above. In some embodiments, the population of cells is expanded by no more than 20%, for example, as assessed by the number of living cells, compared to the population of cells before it is contacted with the agent that stimulates a CD3/TCR complex and/or the agent that stimulates a costimulatory molecule and/or growth factor receptor on the surface of the cells described above. In some embodiments, the population of cells is expanded by no more than 25%, for example, as assessed by the number of living cells, compared to the population of cells before it is contacted with the agent that stimulates a CD3/TCR complex and/or the agent that stimulates a costimulatory molecule and/or growth factor receptor on the surface of the cells described above. In some embodiments, the population of cells is expanded by no more than 30%, for example, as assessed by the number of living cells, compared to the population of cells before it is contacted with the agent that stimulates a CD3/TCR complex and/or the agent that stimulates a costimulatory molecule and/or growth factor receptor on the surface of the cells described above. In some embodiments, the population of cells is expanded by no more than 35%, for example, as assessed by the number of living cells, compared to the population of cells before it is contacted with the agent that stimulates a CD3/TCR complex and/or the agent that stimulates a costimulatory molecule and/or growth factor receptor on the surface of the cells described above. In some embodiments, the population of cells is expanded by no more than 40%, for example, as assessed by the number of living cells, compared to the population of cells before it is contacted with the agent that stimulates a CD3/TCR complex and/or the agent that stimulates a costimulatory molecule and/or growth factor receptor on the surface of the cells described above.

[0532] In some embodiments, the population of cells is expanded by no more than 1, 1.5, 2, 2.5, 3, 3.5, 4, 4.5, 5, 6, 7, 8, 9, 10, 11, 12, 16, 20, 24, 36, or 48 hours, for example, as assessed by the number of living cells, compared to the population of cells before it is contacted with the one or more cytokines described above.

[0533] In some embodiments, the activation process is conducted in serum free cell media. In some embodiments, the activation process is conducted in cell media comprising one or more cytokines chosen from: IL-2, IL-15 (for example, hetIL-15 (IL15/sIL-15Ra)), or IL-6 (for example, IL-6/sIL-6Ra). In some embodiments, hetIL-15 comprises the amino acid sequence of NWVNVISDLKKIEDLIQSMHIDATLYTESDVHPSCKVTAMKCFLLELQVISLESGDASIH DTVENLIILANNSLSSNGNVTESGCKECEELEEKNIKEFLQSFVHIVQMFINTSITCPPPM SVEHADIWVKSYSLYSRERYICNSGFKRKAGTSSLTECVLNKATNVAHWTTPSLKCIR DPALVHQRPAPPSTVTTAGVTPQPESLSPSGKEPAASSPSSNNTAATTAAIVPGSQLMPS KSPSTGTTEISSHESSHGTPSQTTAKNWELTASASHQPPGVYPQG (SEQ ID NO: 309). In some embodiments, hetIL-15 comprises an amino acid sequence having at least about 70, 75, 80, 85, 90, 95, or 99% identity to SEQ ID NO: 309. In some embodiments, the activation process is conducted in cell media comprising a LSD1 inhibitor. In some embodiments, the activation process is conducted in cell media comprising a MALT1 inhibitor. In some embodiments, the serum free cell media comprises a serum replacement. In some embodiments, the serum replacement is CTS™ Immune Cell Serum Replacement (ICSR). In some embodiments, the level of ICSR can be, for example, up to 5%, for example, about 1%, 2%, 3%, 4%, or 5%. Without wishing to be bound by theory, using cell media, for example, Rapid Media shown in Table 21 or Table 25, comprising ICSR, for example, 2% ICSR, may improve cell viability during a manufacture process described herein.

[0534] In some embodiments, the present disclosure provides methods of making a population of cells (for example, T cells) that express a chimeric antigen receptor (CAR) comprising: (a) providing an apheresis sample (for example, a fresh or cryopreserved leukapheresis sample) collected from a subject; (b) selecting T cells from the apheresis sample (for example, using negative selection, positive selection, or selection without beads); (c) seeding isolated T cells at, for example, 1 × 10⁶ to 1 × 10⁷ cells/mL; (d) contacting T cells with an agent that stimulates T cells, for example, an agent that stimulates a CD3/TCR complex and/or an agent that stimulates a costimulatory molecule and/or growth factor receptor on the surface of the cells (for example, contacting T cells with anti-CD3 and/or anti-CD28 antibody, for example, contacting T cells with TransAct); (e) contacting T cells with a nucleic acid molecule (for example, a DNA or RNA molecule) encoding the CAR (for example, contacting T cells with a virus comprising a nucleic acid molecule encoding the CAR) for, for example, 6-48 hours, for example, 20-28 hours; and (f) washing and harvesting T cells for storage (for example, reformulating T cells in cryopreservation media) or administration. In some embodiments, step (f) is performed no later than 30, 36, or 48 hours after the beginning of step (d) or (e), for example, no later than 22, 23, 24, 25, 26, 27, 28, 29, 30, 31, 32, 33, 34, 35, 36, 37, 38, 39, 40, 41, 42, 43, 44, 45, 46, 47, or 48 hours after the beginning of step (d) or (e).

[0535] In some embodiments of the aforementioned methods, the methods are performed in a closed system. In some embodiments, T cell separation, activation, transduction, incubation, and washing are all performed in a closed system. In some embodiments of the aforementioned methods, the methods are performed in separate devices. In some embodiments, T cell separation, activation and transduction, incubation, and washing are performed in separate devices.

[0536] In some embodiments of the aforementioned methods, the methods further comprise adding an adjuvant or a transduction enhancement reagent in the cell culture medium to enhance transduction efficiency. In some embodiments, the adjuvant or transduction enhancement reagent comprises a cationic polymer. In some embodiments, the adjuvant or transduction enhancement reagent is chosen from: LentiBOOST™ (Sirion Biotech), vectofusin-1, F108 (Poloxamer 338 or Pluronic® F-38), protamine sulfate, hexadimethrine bromide (Polybrene), PEA, Pluronic F68, Pluronic F127, Synperonic or LentiTrans™. In some embodiments, the transduction enhancement reagent is LentiBOOST™ (Sirion Biotech). In some embodiments, the transduction enhancement reagent is F108 (Poloxamer 338 or Pluronic® F-38)

[0537] In some embodiments of the aforementioned methods, the transducing the population of cells (for example, T cells) with a viral vector comprises subjecting the population of cells and viral vector to a centrifugal force under conditions such that transduction efficiency is enhanced. In an embodiment, the cells are transduced by spinoculation.

[0538] In some embodiments of the aforementioned methods, cells (e.g., T cells) are activated and transduced in a cell culture flask comprising a gas-permeable membrane at the base that supports large media volumes without substantially compromising gas exchange. In some embodiments, cell growth is achieved by providing access, e.g., substantially uninterrupted access, to nutrients through convection.

### Anti-CD28 Antibody Molecules

[0539] In some embodiments, the anti-CD28 antibody, e.g., an anti-CD28 antibody to be used in a multispecific binding molecule described herein, comprises at least one antigen-binding region, e.g., a variable region or an antigen-binding fragment thereof, from anti-CD28 (2) as described in Table 27. In some embodiments, the anti-CD28 antibody molecule comprises one or two variable regions from anti-CD28 (2), as described in Table 27. In some embodiments, the anti-CD28 antibody comprises a heavy chain variable region (VH) comprising a heavy chain complementarity determining region 1 (HCDR1), a HCDR2, and a HCDR3, and a light chain variable region (VL) comprising a light chain complementarity determining region 1 (LCDR1), a LCDR2, and a LCDR3, wherein the HCDR1, HCDR2, HCDR3, LCDR1, LCDR2, and LCDR3 comprise the amino acid sequences of SEQ ID NOs: 538, 539, 540, 530, 531, and 532, respectively; the HCDR1, HCDR2, HCDR3, LCDR1, LCDR2, and LCDR3 comprise the amino acid sequences of SEQ ID NOs: 541, 539, 540, 530, 531, and 532, respectively; the HCDR1, HCDR2, HCDR3, LCDR1, LCDR2, and LCDR3 comprise the amino acid sequences of SEQ ID NOs: 542, 543, 540, 533, 534, and 535, respectively; or the HCDR1, HCDR2, HCDR3, LCDR1, LCDR2, and LCDR3 comprise the amino acid sequences of SEQ ID NOs: 544, 545, 546, 536, 534, and 532, respectively.

[0540] In some embodiments, the anti-CD28 antibody molecule comprises a VH comprising the amino acid sequence of SEQ ID NO: 547 or 548, or a sequence having at least about 80%, 85%, 90%, 92%, 95%, 97%, 98%, or 99% sequence identity to SEQ ID NO: 547 or 548. In some embodiments, the anti-CD28 antibody comprises a VL comprising the amino acid sequence of SEQ ID NO: 537, or a sequence having at least about 80%, 85%, 90%, 92%, 95%, 97%, 98%, or 99% sequence identity thereto. In some embodiments, the anti-CD28 antibody comprises a VH and a VL comprising the amino acid sequences of SEQ ID NOs: 547 and 537, respectively, or a sequence having at least about 80%, 85%, 90%, 92%, 95%, 97%, 98%, or 99% sequence identity to any of the aforesaid sequences. In some embodiments, the anti-CD28 antibody comprises a VH and a VL comprising the amino acid sequences of SEQ ID NOs: 548 and 537, respectively, or a sequence having at least about 80%, 85%, 90%, 92%, 95%, 97%, 98%, or 99% sequence identity to any of the aforesaid sequences.

[0541] It is understood that an anti-CD28 antibody described herein can be used in the context of a multispecific binding molecule, e.g., with an additional binding domain, e.g., an anti-CD3 binding domain described herein. It is also understood that anti-CD28 antibody described herein can be used in other contexts, e.g., as a monospecific antibody.

### Multispecific Binding Molecule Reagents

[0542] In some embodiments, the agent that stimulates a CD3/TCR complex is an agent that stimulates CD3. In some embodiments, the agent that stimulates CD3 comprises one or more of a CD3 or TCR antigen binding domain, such as but not limited to an anti-CD3 or anti-TCR antibody or an antibody fragment comprising one or more CDRs, VH, heavy chain, VL, and/or light chain thereof.

[0543] Anti-CD3 antibody sequences and methods of making such antibodies are known in the art. Non-limiting examples of anti-CD3 antibody sequences, along with the relevant CDR, VH, and VL sequences are provided in Table 27. In some embodiments, the anti-CD3 binding domain comprises a VH and a VL comprising the amino acid sequences of SEQ ID NOs: 437 and 427, respectively. In some embodiments, the anti-CD3 binding domain comprises a VH and a VL comprising the amino acid sequences of SEQ ID NOs: 456 and 445, respectively. In some embodiments, the anti-CD3 binding domain comprises a VH and a VL comprising the amino acid sequences of SEQ ID NOs: 457 and 446, respectively. In some embodiments, the anti-CD3 binding domain comprises a VH and a VL comprising the amino acid sequences of SEQ ID NOs: 475 and 467, respectively. In some embodiments, the anti-CD3 binding domain comprises a VH and a VL comprising the amino acid sequences of SEQ ID NOs: 476 and 468, respectively. In some embodiments, the anti-CD3 binding domain comprises a VH and a VL comprising the amino acid sequences of SEQ ID NOs: 494 and 484, respectively.

[0544] Anti-TCR antibody sequences and methods of making such antibodies are known in the art. Non-limiting examples of anti-TCR antibody sequences, along with the relevant CDR, VH, and VL sequences are provided in Table 27.

[0545] In some embodiments, the agent that stimulates a costimulatory molecule and/or growth factor receptor is an agent that stimulates CD28, ICOS, CD27, CD25, 4-1BB, IL6RA, IL6RB, or CD2. In some embodiments, the agent that stimulates a costimulatory molecule and/or growth factor receptor comprises one or more of a CD28, ICOS, CD27, CD25, 4-1BB, IL6RB, and/or CD2 antigen binding domain, such as but not limited to an anti-CD28, anti-ICOS, anti-CD27, anti-CD25, anti-4-1BB, anti-IL6RA, anti-IL6RB, or anti-CD2 antibody or an antibody fragment comprising one or more CDRs, heavy chain, and/or light chain thereof.

[0546] Anti-CD28 antibody sequences and methods of making such antibodies are known in the art. Non-limiting examples of anti-CD28 antibody sequences, along with the relevant CDR, VH, VL, HC and LC sequences are provided in Table 27. Anti-ICOS antibody sequences and methods of making such antibodies are known in the art. Non-limiting examples of anti-ICOS antibody sequences, along with the relevant CDR, VH, VL, and LC sequences are provided in Table 27.

[0547] Anti-CD27 antibody sequences and methods of making such antibodies are known in the art. Non-limiting examples of anti-CD27 antibody sequences, along with the relevant CDR, VH, and VL sequences are provided in Table 27.

[0548] Anti-CD25 antibody sequences and methods of making such antibodies are known in the art. Non-limiting examples of anti-CD25 antibody sequences, along with the relevant CDR, VH, VL, HC, and LC sequences are provided in Table 27.

[0549] Anti1BB antibody sequences and methods of making such antibodies are known in the art. Non-limiting examples of antiIBB antibody sequences, along with the relevant CDR, VH, and VL sequences are provided in Table 27.

[0550] Anti-IL6RA antibody sequences and methods of making such antibodies are known in the art. Non-limiting examples of IL6RA antibody sequences, along with the relevant CDR, VH, and VL sequences are provided in Table 27.

[0551] Anti-IL6RB antibody sequences and methods of making such antibodies are known in the art. Non-limiting examples of IL6RB antibody sequences, along with the relevant CDR, VH, and VL sequences are provided in Table 27.

[0552] Anti-CD2 antibody sequences and methods of making such antibodies are known in the art. Non-limiting examples of anti-CD2 antibody sequences, along with the relevant CDR, VH, VL, HC and LC sequences are provided in Table 27

TABLE 27

Exemplary antibody, CDR, heavy chain variable region (VH), light chain variable region (VL), heavy chain (HC), and light chain (LC) sequences by target antigen

| SEQ ID NO | Description | Amino acid sequence |
|---|---|---|
| ANTI-CD3 (1) | | |
| SEQ ID NO: 420 (Combined) | LCDR1 | SASSSVSYMN |
| SEQ ID NO: 421 (Combined) | LCDR2 | DTSKLAS |
| SEQ ID NO: 422 (Combined) | LCDR3 | QQWSSNPFT |
| SEQ ID NO: 420 (Kabat) | LCDR1 | SASSSVSYMN |
| SEQ ID NO: 421 (Kabat) | LCDR2 | DTSKLAS |
| SEQ ID NO: 422 (Kabat) | LCDR3 | QQWSSNPFT |
| SEQ ID NO: 423 (Chothia) | LCDR1 | SSSVSY |
| SEQ ID NO: 424 (Chothia) | LCDR2 | DTS |
| SEQ ID NO: 425 (Chothia) | LCDR3 | WSSNPF |
| SEQ ID NO: 426 (IMGT) | LCDR1 | SSVSY |
| SEQ ID NO: 424 (IMGT) | LCDR2 | DTS |
| SEQ ID NO: 422 (IMGT) | LCDR3 | QQWSSNPFT |
| SEQ ID NO: 427 | VL | [sequence omitted] |
| SEQ ID NO: 428 (Combined) | HCDR1 | GYTFTRYTMH |
| SEQ ID NO: 429 (Combined) | HCDR2 | YINPSRGYTNYNQKVKD |
| SEQ ID NO: 430 (Combined) | HCDR3 | YYDDHYSLDY |
| SEQ ID NO: 431 (Kabat) | HCDR1 | RYTMH |
| SEQ ID NO: 429 (Kabat) | HCDR2 | YINPSRGYTNYNQKVKD |
| SEQ ID NO: 430 (Kabat) | HCDR3 | YYDDHYSLDY |
| SEQ ID NO: 432 (Chothia) | HCDR1 | GYTFTRY |
| SEQ ID NO: 433 (Chothia) | HCDR2 | NPSRGY |
| SEQ ID NO: 430 (Chothia) | HCDR3 | YYDDHYSLDY |
| SEQ ID NO: 434 (IMGT) | HCDR1 | GYTFTRYT |
| SEQ ID NO: 435 (IMGT) | HCDR2 | INPSRGYT |
| SEQ ID NO: 436 (IMGT) | HCDR3 | ARYYDDHYSLDY |
| SEQ ID NO: 437 | VH | QVQLVQSGGGVVQPGRSLRLSCKASGYTFTRYTMHWVRQAPGKGLEWIGYINPSRGYTNYNQKVKDRFTISRDNSKNTAFLQMDSLRPEDTGVYFCARYYDDHYSLDYWGQGTPVTVSS |
| ANTI-CD3 (2) | | |
| SEQ ID NO: 438 (Combined) | LCDR1 | GSSTGAVTSGNYPN |
| SEQ ID NO: 439 (Combined) | LCDR2 | GTKFLAP |
| SEQ ID NO: 440 (Combined) | LCDR3 | VLWYSNRWV |
| SEQ ID NO: 438 (Kabat) | LCDR1 | GSSTGAVTSGNYPN |
| SEQ ID NO: 439 (Kabat) | LCDR2 | GTKFLAP |
| SEQ ID NO: 440 (Kabat) | LCDR3 | VLWYSNRWV |
| SEQ ID NO: 441 (Chothia) | LCDR1 | STGAVTSGNY |
| SEQ ID NO: 442 (Chothia) | LCDR2 | GTK |
| SEQ ID NO: 443 (Chothia) | LCDR3 | WYSNRW |
| SEQ ID NO: 444 (IMGT) | LCDR1 | TGAVTSGNY |
| SEQ ID NO: 442 (IMGT) | LCDR2 | GTK |
| SEQ ID NO: 440 (IMGT) | LCDR3 | VLWYSNRWV |
| SEQ ID NO: 445 | VL | QTVVTQEPSLTVSPGGTVTLTCGSSTGAVTSGNYPNWVQQKPGQAPRGLIGGTKFLAPGTPARFSGSLLGGKAALTLSGVQPEDEAEYYCVLWYSNRWVFGGGTKLTVL |
| SEQ ID NO: 446 | VL | QTVVTQEPSLTVSPGGTVTLTCGSSTGAVTSGNYPNWVQQKPGQAPRGLIGGTKFLAPGTPARFSGSLLGGKAALTLSGVQPEDEAEYYCVLWYSNRWVFGCGTKLTVL |
| SEQ ID NO: 447 (Combined) | HCDR1 | GFTFNKYAMN |
| SEQ ID NO: 448 (Combined) | HCDR2 | RIRSKYNNYATYYADSVKD |
| SEQ ID NO: 449 (Combined) | HCDR3 | HGNFGNSYISYWAY |
| SEQ ID NO: 450 (Kabat) | HCDR1 | KYAMN |
| SEQ ID NO: 448 (Kabat) | HCDR2 | RIRSKYNNYATYYADSVKD |
| SEQ ID NO: 449 (Kabat) | HCDR3 | HGNFGNSYISYWAY |
| SEQ ID NO: 451 (Chothia) | HCDR1 | GFTFNKY |
| SEQ ID NO: 452 (Chothia) | HCDR2 | RSKYNNYA |
| SEQ ID NO: 449 (Chothia) | HCDR3 | HGNFGNSYISYWAY |
| SEQ ID NO: 453 (IMGT) | HCDR1 | GFTFNKYA |
| SEQ ID NO: 454 (IMGT) | HCDR2 | IRSKYNNYAT |
| SEQ ID NO: 455 (IMGT) | HCDR3 | VRHGNFGNSYISYWAY |
| SEQ ID NO: 456 | VH | EVQLVESGGGLVQPGGSLKLSCAASGFTFNKYAMNWVRQAPGKGLEWVARIRSKYNNYATYYADSVKDRFTISRDDSKNTAYLQMNNLKTEDTAVYYCVRHGNFGNSYISYWAYWGQGTLVTVSS |
| SEQ ID NO: 457 | VH | EVQLVESGGGLVQPGGSLKLSCAASGFTFNKYAMNWVRQAPGKCLEWVARIRSKYNNYATYYADSVKDRFTISRDDSKNTAYLQMNNLKTEDTAVYYCVRHGNFGNSYISYWAYWGQGTLVTVSS |
| ANTI-CD3 (3) | | |
| SEQ ID NO: 458 (Combined) | LCDR1 | RSSTGAVTTSNYAN |
| SEQ ID NO: 459 (Combined) | LCDR2 | GTNKRAP |
| SEQ ID NO: 460 (Combined) | LCDR3 | ALWYSNLWV |
| SEQ ID NO: 458 (Kabat) | LCDR1 | RSSTGAVTTSNYAN |
| SEQ ID NO: 459 (Kabat) | LCDR2 | GTNKRAP |
| SEQ ID NO: 460 (Kabat) | LCDR3 | ALWYSNLWV |
| SEQ ID NO: 461 (Chothia) | LCDR1 | STGAVTTSNY |
| SEQ ID NO: 462 (Chothia) | LCDR2 | GTN |
| SEQ ID NO: 463 (Chothia) | LCDR3 | WYSNLW |
| SEQ ID NO: 464 (IMGT) | LCDR1 | TGAVTTSNY |
| SEQ ID NO: 465 (IMGT) | LCDR2 | GGT |
| SEQ ID NO: 466 (IMGT) | LCDR3 | ALWYSNL |
| SEQ ID NO: 467 | VL | QAVVTQEPSLTVSPGGTVTLTCRSSTGAVTTSNYANWVQQKPGQAPRGLIGGTNKRAPWTPARFSGSLLGDKAALTLSGAQPEDEAEYFCALWYSNLWVFGGGTKLTVL |
| SEQ ID NO: 468 | VL | QAVVTQEPSLTVSPGGTVTLTCRSSTGAVTTSNYANWVQQKPGQAPRGLIGGTNKRAPWTPARFSGSLLGDKAALTLSGAQPEDEAEYFCALWYSNLWVFGCGTKLTVL |
| SEQ ID NO: 469 (Combined) | HCDR1 | GFTFNTYAMN |
| SEQ ID NO: 448 (Combined) | HCDR2 | RIRSKYNNYATYYADSVKD |
| SEQ ID NO: 470 (Combined) | HCDR3 | HGNFGNSYVSWFAY |
| SEQ ID NO: 471 (Kabat) | HCDR1 | TYAMN |
| SEQ ID NO: 448 (Kabat) | HCDR2 | RIRSKYNNYATYYADSVKD |
| SEQ ID NO: 470 (Kabat) | HCDR3 | HGNFGNSYVSWFAY |
| SEQ ID NO: 472 (Chothia) | HCDR1 | GFTFNTY |
| SEQ ID NO: 452 (Chothia) | HCDR2 | RSKYNNYA |
| SEQ ID NO: 470 (Chothia) | HCDR3 | HGNFGNSYVSWFAY |
| SEQ ID NO: 473 (IMGT) | HCDR1 | GFTFNTYA |
| SEQ ID NO: 454 (IMGT) | HCDR2 | IRSKYNNYAT |
| SEQ ID NO: 474 (IMGT) | HCDR3 | VRHGNFGNSYVSWFAY |
| SEQ ID NO: 475 | VH | EVQLVESGGGLVQPGGSLKLSCAASGFTFNTYAMNWVRQASGKGLEWVGRIRSKYNNYATYYADSVKDRFTISRDDSKSTLYLQMNSLKTEDTAVYYCVRHGNFGNSYVSWFAYWGQGTLVTVSS |
| SEQ ID NO: 476 | VH | EVQLVESGGGLVQPGGSLKLSCAASGFTFNTYAMNWVRQASGKCLEWVGRIRSKYNNYATYYADSVKDRFTISRDDSKSTLYLQMNSLKTEDTAVYYCVRHGNFGNSYVSWFAYWGQGTLVTVSS |
| ANTI-CD3 (4) | | |
| SEQ ID NO: 477 (Combined) | LCDR1 | RSSQSLVRSEGTTYFN |
| SEQ ID NO: 478 (Combined) | LCDR2 | RVSNRFS |
| SEQ ID NO: 479 (Combined) | LCDR3 | LQSSHFPWT |
| SEQ ID NO: 477 (Kabat) | LCDR1 | RSSQSLVRSEGTTYFN |
| SEQ ID NO: 478 (Kabat) | LCDR2 | RVSNRFS |
| SEQ ID NO: 479 (Kabat) | LCDR3 | LQSSHFPWT |
| SEQ ID NO: 480 (Chothia) | LCDR1 | SQSLVRSEGTTY |
| SEQ ID NO: 481 (Chothia) | LCDR2 | RVS |
| SEQ ID NO: 482 (Chothia) | LCDR3 | SSHFPW |
| SEQ ID NO: 483 (IMGT) | LCDR1 | QSLVRSEGTTY |
| SEQ ID NO: 481 (IMGT) | LCDR2 | RVS |
| SEQ ID NO: 479 (IMGT) | LCDR3 | LQSSHFPWT |
| SEQ ID NO: 484 | VL | DILVTQTPVSLPVSLGGHVSISCRSSQSLVRSEGTTYFNWYLQKPGQSPQLLIYRVSNRFSGVPDRFSGSGSGTDFTLKISRVEPEDLGVYYCLQSSHFPWTFGGGTKLELK |
| SEQ ID NO: 485 (Combined) | HCDR1 | GFTFSKQGMH |
| SEQ ID NO: 486 (Combined) | HCDR2 | MIYYDSSKMYYADTVKG |
| SEQ ID NO: 487 (Combined) | HCDR3 | FWWDLDFDH |
| SEQ ID NO: 488 (Kabat) | HCDR1 | KQGMH |
| SEQ ID NO: 486 (Kabat) | HCDR2 | MIYYDSSKMYYADTVKG |
| SEQ ID NO: 487 (Kabat) | HCDR3 | FWWDLDFDH |
| SEQ ID NO: 489 (Chothia) | HCDR1 | GFTFSKQ |
| SEQ ID NO: 490 (Chothia) | HCDR2 | YYDSSK |
| SEQ ID NO: 487 (Chothia) | HCDR3 | FWWDLDFDH |
| SEQ ID NO: 491 (IMGT) | HCDR1 | GFTFSKQG |
| SEQ ID NO: 492 (IMGT) | HCDR2 | IYYDSSKM |
| SEQ ID NO: 493 (IMGT) | HCDR3 | ASFWWDLDFDH |
| SEQ ID NO: 494 | VH | EVKLVESGGDLVQPGDSLTLSCVASGFTFSKQGMHWIRQAPKKGLEWIAMIYYDSSKMYYADTVKGRFTISRDNSKNTLYLEMNSLRSEDTAMYYCASFWWDLDFDHWGQGVMVTVSS |
| ANTI-TCR | | |
| SEQ ID NO: 495 (Combined) | LCDR1 | SATSSVSYMH |
| SEQ ID NO: 421 (Combined) | LCDR2 | DTSKLAS |
| SEQ ID NO: 496 (Combined) | LCDR3 | QQWSSNPLT |
| SEQ ID NO: 495 (Kabat) | LCDR1 | SATSSVSYMH |
| SEQ ID NO: 421 (Kabat) | LCDR2 | DTSKLAS |
| SEQ ID NO: 496 (Kabat) | LCDR3 | QQWSSNPLT |
| SEQ ID NO: 497 (Chothia) | LCDR1 | TSSVSY |
| SEQ ID NO: 424 (Chothia) | LCDR2 | DTS |
| SEQ ID NO: 498 (Chothia) | LCDR3 | WSSNPL |
| SEQ ID NO: 426 (IMGT) | LCDR1 | SSVSY |
| SEQ ID NO: 424 (IMGT) | LCDR2 | DTS |
| SEQ ID NO: 496 (IMGT) | LCDR3 | QQWSSNPLT |
| SEQ ID NO: 499 | VL | QIVLTQSPAIMSASPGEKVTMTCSATSSVSYMHWYQQKSGTSPKRWIYDTSKLASGVPARFSGSGSGTSYSLTISSMEAEDAATYYCQQWSSNPLTFGAGTKLELK |
| SEQ ID NO: 500 (Combined) | HCDR1 | GYKFTSYVMH |
| SEQ ID NO: 501 (Combined) | HCDR2 | YINPYNDVTKYNEKFKG |
| SEQ ID NO: 502 (Combined) | HCDR3 | GSYYDYDGFVY |
| SEQ ID NO: 503 (Kabat) | HCDR1 | SYVMH |
| SEQ ID NO: 501 (Kabat) | HCDR2 | YINPYNDVTKYNEKFKG |
| SEQ ID NO: 502 (Kabat) | HCDR3 | GSYYDYDGFVY |
| SEQ ID NO: 504 (Chothia) | HCDR1 | GYKFTSY |
| SEQ ID NO: 505 (Chothia) | HCDR2 | NPYNDV |
| SEQ ID NO: 502 (Chothia) | HCDR3 | GSYYDYDGFVY |
| SEQ ID NO: 506 (IMGT) | HCDR1 | GYKFTSYV |
| SEQ ID NO: 507 (IMGT) | HCDR2 | INPYNDVT |
| SEQ ID NO: 508 (IMGT) | HCDR3 | ARGSYYDYDGFVY |
| SEQ ID NO: 509 | VH | EVQLQQSGPELVKPGASVKMSCKASGYKFTSYVMHWVKQKPGQGLEWIGYINPYNDVTKYNEKFKGKATLTSDKSSSTAYMELSSLTSEDSAVHYCARGSYYDYDGFVYWGQGTLVTVSA |
| ANTI-CD28 (1) | | |
| SEQ ID NO: 510 (Combined) | LCDR1 | HASQNIYVWLN |
| SEQ ID NO: 511 (Combined) | LCDR2 | KASNLHT |
| SEQ ID NO: 512 (Combined) | LCDR3 | QQGQTYPYT |
| SEQ ID NO: 510 (Kabat) | LCDR1 | HASQNIYVWLN |
| SEQ ID NO: 511 (Kabat) | LCDR2 | KASNLHT |
| SEQ ID NO: 512 (Kabat) | LCDR3 | QQGQTYPYT |
| SEQ ID NO: 513 (Chothia) | LCDR1 | SQNIYVW |
| SEQ ID NO: 514 (Chothia) | LCDR2 | KAS |
| SEQ ID NO: 515 (Chothia) | LCDR3 | GQTYPY |
| SEQ ID NO: 516 (IMGT) | LCDR1 | QNIYVW |
| SEQ ID NO: 514 (IMGT) | LCDR2 | KAS |
| SEQ ID NO: 512 (IMGT) | LCDR3 | QQGQTYPYT |
| SEQ ID NO: 517 | VL | DIQMTQSPSSLSASVGDRVTITCHASQNIYVWLNWYQQKPGKAPKLLIYKASNLHTGVPSRFSGSGSGTDFTLTISSLQPEDFATYYCQQGQTYPYTFGGGTKVEIK |
| SEQ ID NO: 518 | LC | DIQMTQSPSSLSASVGDRVTITCHASQNIYVWLNWYQQKPGKAPKLLIYKASNLHTGVPSRFSGSGSGTDFTLTISSLQPEDFATYYCQQGQTYPYTFGGGTKVEIKRTVAAPSVFIFPPSDEQLKSGTASVVCLLNNFYPREAKVQWKVDNALQSGNSQESVTEQDSKDSTYSLSSTLTLSKADYEKHKVYACEVTHQGLSSPVTKSFNRGEC |
| SEQ ID NO: 519 (Combined) | HCDR1 | GYTFTSYYIH |
| SEQ ID NO: 520 (Combined) | HCDR2 | CIYPGNVNTNYNEKFKD |
| SEQ ID NO: 521 (Combined) | HCDR3 | SHYGLDWNFDV |
| SEQ ID NO: 522 (Kabat) | HCDR1 | SYYIH |
| SEQ ID NO: 520 (Kabat) | HCDR2 | CIYPGNVNTNYNEKFKD |
| SEQ ID NO: 521 (Kabat) | HCDR3 | SHYGLDWNFDV |
| SEQ ID NO: 523 (Chothia) | HCDR1 | GYTFTSY |
| SEQ ID NO: 524 (Chothia) | HCDR2 | YPGNVN |
| SEQ ID NO: 521 (Chothia) | HCDR3 | SHYGLDWNFDV |
| SEQ ID NO: 525 (IMGT) | HCDR1 | GYTFTSYY |
| SEQ ID NO: 526 (IMGT) | HCDR2 | IYPGNVNT |
| SEQ ID NO: 527 (IMGT) | HCDR3 | TRSHYGLDWNFDV |
| SEQ ID NO: 528 | VH | QVQLVQSGAEVKKPGASVKVSCKASGYTFTSYYIHWVRQAPGQGLEWIGCIYPGNVNTNYNEKFKDRATLTVDTSISTAYMELSRLRSDDTAVYFCTRSHYGLDWNFDVWGQGTTVTVSS |
| SEQ ID NO: 529 | HC | QVQLVQSGAEVKKPGASVKVSCKASGYTFTSYYIHWVRQAPGQGLEWIGCIYPGNVNTNYNEKFKDRATLTVDTSISTAYMELSRLRSDDTAVYFCTRSHYGLDWNFDVWGQGTTVTVSSASTKGPSVFPLAPSSKSTSGGTAALGCLVKDYFPEPVTVSWNSGALTSGVHTFPAVLQSSGLYSLSSVVTVPSSSLGTQTYICNVNHKPSNTKVDKRVEPKSC |
| ANTI-CD28 (2) | | |
| SEQ ID NO: 530 (Combined) | LCDR1 | SGSSSNIVSNYVN |
| SEQ ID NO: 531 (Combined) | LCDR2 | DNNKRPS |
| SEQ ID NO: 532 (Combined) | LCDR3 | QSYAIGSYSVV |
| SEQ ID NO: 530 (Kabat) | LCDR1 | SGSSSNIVSNYVN |
| SEQ ID NO: 531 (Kabat) | LCDR2 | DNNKRPS |
| SEQ ID NO: 532 (Kabat) | LCDR3 | QSYAIGSYSVV |
| SEQ ID NO: 533 (Chothia) | LCDR1 | SSSNIVSNY |
| SEQ ID NO: 534 (Chothia) | LCDR2 | DNN |
| SEQ ID NO: 535 (Chothia) | LCDR3 | YAIGSYSV |
| SEQ ID NO: 536 (IMGT) | LCDR1 | SSNIVSNY |
| SEQ ID NO: 534 (IMGT) | LCDR2 | DNN |
| SEQ ID NO: 532 (IMGT) | LCDR3 | QSYAIGSYSVV |
| SEQ ID NO: 537 | VL | DIVLTQPPSVSGAPGQRVTISCSGSSSNIVSNYVNWYQQLPGTAPKLLIYDNNKRPSGVPDRFSGSKSGTSASLAITGLQSEDEADYYCQSYAIGSYSVVFGGGTKLTVL |
| SEQ ID NO: 538 (Combined) | HCDR1 | GFTFSTYGMS |
| SEQ ID NO: 539 (Combined) | HCDR2 | SIFYTGSSTYYADSVKG |
| SEQ ID NO: 540 (Combined) | HCDR3 | IGYAGDSKYAI |
| SEQ ID NO: 541 (Kabat) | HCDR1 | TYGMS |
| SEQ ID NO: 539 (Kabat) | HCDR2 | SIFYTGSSTYYADSVKG |
| SEQ ID NO: 540 (Kabat) | HCDR3 | IGYAGDSKYAI |
| SEQ ID NO: 542 (Chothia) | HCDR1 | GFTFSTY |
| SEQ ID NO: 543 (Chothia) | HCDR2 | FYTGSS |
| SEQ ID NO: 540 (Chothia) | HCDR3 | IGYAGDSKYAI |
| SEQ ID NO: 544 (IMGT) | HCDR1 | GFTFSTYG |
| SEQ ID NO: 545 (IMGT) | HCDR2 | IFYTGSST |
| SEQ ID NO: 546 (IMGT) | HCDR3 | ARIGYAGDSKYAI |
| SEQ ID NO: 547 | VH | QVQLVESGGGLVQPGGSLRLSCAASGFTFSTYGMSWVRQAPGKGLEWVSSIFYTGSSTYYADSVKGRFTISRDNSKNTLYLQMNSLRAEDTAVYYCARIGYAGDSKYAIWGQGTLVTVSS |
| SEQ ID NO: 548 | VH | EVQLVESGGGLVQPGGSLRLSCAASGFTFSTYGMSWVRQAPGKGLEWVSSIFYTGSSTYYADSVKGRFTISRDNSKNTLYLQMNSLRAEDTAVYYCARIGYAGDSKYAIWGQGTLVTVSS |
| ANTI-ICOS | | |
| SEQ ID NO: 549 (Combined) | LCDR1 | KSSQSLLSGSFNYLT |
| SEQ ID NO: 550 (Combined) | LCDR2 | YASTRHT |
| SEQ ID NO: 551 (Combined) | LCDR3 | HHHYNAPPT |
| SEQ ID NO: 549 (Kabat) | LCDR1 | KSSQSLLSGSFNYLT |
| SEQ ID NO: 550 (Kabat) | LCDR2 | YASTRHT |
| SEQ ID NO: 551 (Kabat) | LCDR3 | HHHYNAPPT |
| SEQ ID NO: 552 (Chothia) | LCDR1 | SQSLLSGSFNY |
| SEQ ID NO: 553 (Chothia) | LCDR2 | YAS |
| SEQ ID NO: 554 (Chothia) | LCDR3 | HYNAPP |
| SEQ ID NO: 555 (IMGT) | LCDR1 | QSLLSGSFNY |
| SEQ ID NO: 553 (IMGT) | LCDR2 | YAS |
| SEQ ID NO: 551 (IMGT) | LCDR3 | HHHYNAPPT |
| SEQ ID NO: 556 | VL | DIVMTQSPDSLAVSLGERATINCKSSQSLLSGSFNYLTWYQQKPGQPPKLLIFYASTRHTGVPDRFSGSGSGTDFTLTISSLQAEDVAVYYCHHHYNAPPTFGPGTKVDIK |
| SEQ ID NO: 557 | LC | DIVMTQSPDSLAVSLGERATINCKSSQSLLSGSFNYLTWYQQKPGQPPKLLIFYASTRHTGVPDRFSGSGSGTDFTLTISSLQAEDVAVYYCHHHYNAPPTFGPGTKVDIKRTVAAPSVFIFPPSDEQLKSGTASVVCLLNNFYPREAKVQWKVDNALQSGNSQESVTEQDSKDSTYSLSSTLTLSKADYEKHKVYACEVTHQGLSSPVTKSFNRGEC |
| SEQ ID NO: 558 (Combined) | HCDR1 | GFTFSDYWMD |
| SEQ ID NO: 559 (Combined) | HCDR2 | NIDEDGSITEYSPFVKG |
| SEQ ID NO: 560 (Combined) | HCDR3 | WGRFGFDS |
| SEQ ID NO: 561 (Kabat) | HCDR1 | DYWMD |
| SEQ ID NO: 559 (Kabat) | HCDR2 | NIDEDGSITEYSPFVKG |
| SEQ ID NO: 560 (Kabat) | HCDR3 | WGRFGFDS |
| SEQ ID NO: 562 (Chothia) | HCDR1 | GFTFSDY |
| SEQ ID NO: 563 (Chothia) | HCDR2 | DEDGSI |
| SEQ ID NO: 560 (Chothia) | HCDR3 | WGRFGFDS |
| SEQ ID NO: 564 (IMGT) | HCDR1 | GFTFSDYW |
| SEQ ID NO: 565 (IMGT) | HCDR2 | IDEDGSIT |
| SEQ ID NO: 566 (IMGT) | HCDR3 | TRWGRFGFDS |
| SEQ ID NO: 567 | VH | EVQLVESGGGLVQPGGSLRLSCAASGFTFSDYWMDWVRQAPGKGLVWVSNIDEDGSITEYSPFVKGRFTISRDNAKNTLYLQMNSLRAEDTAVYYCTRWGRFGFDSWGQGTLVTVSS |
| ANTI-CD27 | | |
| SEQ ID NO: 568 (Combined) | LCDR1 | RASQGISRWLA |
| SEQ ID NO: 55 (Combined) | LCDR2 | AASSLQS |
| SEQ ID NO: 569 (Combined) | LCDR3 | QQYNTYPRT |
| SEQ ID NO: 568 (Kabat) | LCDR1 | RASQGISRWLA |
| SEQ ID NO: 55 (Kabat) | LCDR2 | AASSLQS |
| SEQ ID NO: 569 (Kabat) | LCDR3 | QQYNTYPRT |
| SEQ ID NO: 570 (Chothia) | LCDR1 | SQGISRW |
| SEQ ID NO: 58 (Chothia) | LCDR2 | AAS |
| SEQ ID NO: 571 (Chothia) | LCDR3 | YNTYPR |
| SEQ ID NO: 572 (IMGT) | LCDR1 | QGISRW |
| SEQ ID NO: 58 (IMGT) | LCDR2 | AAS |
| SEQ ID NO: 569 (IMGT) | LCDR3 | QQYNTYPRT |
| SEQ ID NO: 573 | VL | DIQMTQSPSSLSASVGDRVTITCRASQGISRWLAWYQQKPEKAPKSLIYAASSLQSGVPSRFSGSGSGTDFTLTISSLQPEDFATYYCQQYNTYPRTFGQGTKVEIK |
| SEQ ID NO: 574 (Combined) | HCDR1 | GFTFSSYDMH |
| SEQ ID NO: 575 (Combined) | HCDR2 | VIWYDGSNKYYADSVKG |
| SEQ ID NO: 576 (Combined) | HCDR3 | GSGNWGFFDY |
| SEQ ID NO: 577 (Kabat) | HCDR1 | SYDMH |
| SEQ ID NO: 575 (Kabat) | HCDR2 | VIWYDGSNKYYADSVKG |
| SEQ ID NO: 576 (Kabat) | HCDR3 | GSGNWGFFDY |
| SEQ ID NO: 47 (Chothia) | HCDR1 | GFTFSSY |
| SEQ ID NO: 578 (Chothia) | HCDR2 | WYDGSN |
| SEQ ID NO: 576 (Chothia) | HCDR3 | GSGNWGFFDY |
| SEQ ID NO: 579 (IMGT) | HCDR1 | GFTFSSYD |
| SEQ ID NO: 580 (IMGT) | HCDR2 | IWYDGSNK |
| SEQ ID NO: 581 (IMGT) | HCDR3 | ARGSGNWGFFDY |
| SEQ ID NO: 582 | VH | QVQLVESGGGVVQPGRSLRLSCAASGFTFSSYDMHWVRQAPGGLEWVAVIWYDGSNKYYADSVKGRFTISRDNSKNTLYLQMNSLRAEDTAVYYCARGSGNWGFFDYWGQGTLVTVSS |
| ANTI-CD25 (1) | | |
| SEQ ID NO: 583 (Combined) | LCDR1 | SASSSRSYMQ |
| SEQ ID NO: 421 (Combined) | LCDR2 | DTSKLAS |
| SEQ ID NO: 584 (Combined) | LCDR3 | HQRSSYT |
| SEQ ID NO: 583 (Kabat) | LCDR1 | SASSSRSYMQ |
| SEQ ID NO: 421 (Kabat) | LCDR2 | DTSKLAS |
| SEQ ID NO: 584 (Kabat) | LCDR3 | HQRSSYT |
| SEQ ID NO: 585 (Chothia) | LCDR1 | SSSRSY |
| SEQ ID NO: 424 (Chothia) | LCDR2 | DTS |
| SEQ ID NO: 586 (Chothia) | LCDR3 | RSSY |
| SEQ ID NO: 587 (IMGT) | LCDR1 | SSRSY |
| SEQ ID NO: 424 (IMGT) | LCDR2 | DTS |
| SEQ ID NO: 584 (IMGT) | LCDR3 | HQRSSYT |
| SEQ ID NO: 588 | VL | [sequence omitted] |
| SEQ ID NO: 589 (Combined) | HCDR1 | GYSFTRYWMH |
| SEQ ID NO: 590 (Combined) | HCDR2 | AIYPGNSDTSYNQKFEG |
| SEQ ID NO: 591 (Combined) | HCDR3 | DYGYYFDF |
| SEQ ID NO: 592 (Kabat) | HCDR1 | RYWMH |
| SEQ ID NO: 590 (Kabat) | HCDR2 | AIYPGNSDTSYNQKFEG |
| SEQ ID NO: 591 (Kabat) | HCDR3 | DYGYYFDF |
| SEQ ID NO: 593 (Chothia) | HCDR1 | GYSFTRY |
| SEQ ID NO: 594 (Chothia) | HCDR2 | YPGNSD |
| SEQ ID NO: 591 (Chothia) | HCDR3 | DYGYYFDF |
| SEQ ID NO: 595 (IMGT) | HCDR1 | GYSFTRYW |
| SEQ ID NO: 596 (IMGT) | HCDR2 | IYPGNSDT |
| SEQ ID NO: 597 (IMGT) | HCDR3 | SRDYGYYFDF |
| SEQ ID NO: 598 | VH | EVQLQQSGTVLARPGASVKMSCKASGYSFTRYWMHWIKQRPGQGLEWIGAIYPGNSDTSYNQKFEGKAKLTAVTSASTAYMELSSLTHEDSAVYYCSRDYGYYFDFWGQGTTLTVSS |
| ANTI-CD25 (2) | | |
| SEQ ID NO: 599 (Combined) | LCDR1 | KASQSVDYDGDSYMN |
| SEQ ID NO: 600 (Combined) | LCDR2 | AASNLES |
| SEQ ID NO: 601 (Combined) | LCDR3 | QQSNEDPYT |
| SEQ ID NO: 599 (Kabat) | LCDR1 | KASQSVDYDGDSYMN |
| SEQ ID NO: 600 (Kabat) | LCDR2 | AASNLES |
| SEQ ID NO: 601 (Kabat) | LCDR3 | QQSNEDPYT |
| SEQ ID NO: 602 (Chothia) | LCDR1 | SQSVDYDGDSY |
| SEQ ID NO: 58 (Chothia) | LCDR2 | AAS |
| SEQ ID NO: 603 (Chothia) | LCDR3 | SNEDPY |
| SEQ ID NO: 604 (IMGT) | LCDR1 | QSVDYDGDSY |
| SEQ ID NO: 58 (IMGT) | LCDR2 | AAS |
| SEQ ID NO: 601 (IMGT) | LCDR3 | QQSNEDPYT |
| SEQ ID NO: 605 | VL | DIVLTQSPLSLPVTLGQPASISCKASQSVDYDGDSYMNWYQQRPGQSPRLLIYAASNLESGVPDRFSGSGSGTDFTLKISRVEAEDVGVYYCQQSNEDPYTFGGGTKVEIK |
| SEQ ID NO: 606 | LC | DIVLTQSPLSLPVTLGQPASISCKASQSVDYDGDSYMNWYQQRPGQSPRLLIYAASNLESGVPDRFSGSGSGTDFTLKISRVEAEDVGVYYCQQSNEDPYTFGGGTKVEIKRTVAAPSVFIFPPSDEQLKSGTASVVCLLNNFYPREAKVQWKVDNALQSGNSQESVTEQDSKDSTYSLSSTLTLSKADYEKHKVYACEVTHQGLSSPVTKSFNRGEC |
| SEQ ID NO: 607 (Combined) | HCDR1 | GYAFTNYLIE |
| SEQ ID NO: 608 (Combined) | HCDR2 | VINPGSGGTNYNEKFKG |
| SEQ ID NO: 609 (Combined) | HCDR3 | WRGDGYYAYFDV |
| SEQ ID NO: 610 (Kabat) | HCDR1 | NYLIE |
| SEQ ID NO: 608 (Kabat) | HCDR2 | VINPGSGGTNYNEKFKG |
| SEQ ID NO: 609 (Kabat) | HCDR3 | WRGDGYYAYFDV |
| SEQ ID NO: 611 (Chothia) | HCDR1 | GYAFTNY |
| SEQ ID NO: 612 (Chothia) | HCDR2 | NPGSGG |
| SEQ ID NO: 609 (Chothia) | HCDR3 | WRGDGYYAYFDV |
| SEQ ID NO: 613 (IMGT) | HCDR1 | GYAFTNYL |
| SEQ ID NO: 614 (IMGT) | HCDR2 | INPGSGGT |
| SEQ ID NO: 615 (IMGT) | HCDR3 | ARWRGDGYYAYFDV |
| SEQ ID NO: 616 | VH | EVQLVQSGAEVKKPGESLKISCKGSGYAFTNYLIEWVRQMPGKGLEWMGVINPGSGGTNYNEKFKGQVTISADKSISTAYLQWSSLKASDTAMYYCARWRGDGYYAYFDVWGQGTTVTVSS |
| SEQ ID NO: 617 | HC | EVQLVQSGAEVKKPGESLKISCKGSGYAFTNYLIEWVRQMPGKGLEWMGVINPGSGGTNYNEKFKGQVTISADKSISTAYLQWSSLKASDTAMYYCARWRGDGYYAYFDVWGQGTTVTVSSASTKGPSVFPLAPSSKSTSGGTAALGCLVKDYFPEPVTVSWNSGALTSGVHTFPAVLQSSGLYSLSSVVTVPSSSLGTQTYICNVNHKPSNTKVDKRVEPKSC |
| ANTI-4-1BB | | |
| SEQ ID NO: 618 (Combined) | LCDR1 | RASQSVSSYLA |
| SEQ ID NO: 619 (Combined) | LCDR2 | DASNRAT |
| SEQ ID NO: 620 (Combined) | LCDR3 | QQRSNWPPALT |
| SEQ ID NO: 618 (Kabat) | LCDR1 | RASQSVSSYLA |
| SEQ ID NO: 619 (Kabat) | LCDR2 | DASNRAT |
| SEQ ID NO: 620 (Kabat) | LCDR3 | QQRSNWPPALT |
| SEQ ID NO: 621 (Chothia) | LCDR1 | SQSVSSY |
| SEQ ID NO: 622 (Chothia) | LCDR2 | DAS |
| SEQ ID NO: 623 (Chothia) | LCDR3 | RSNWPPAL |
| SEQ ID NO: 624 (IMGT) | LCDR1 | QSVSSY |
| SEQ ID NO: 622 (IMGT) | LCDR2 | DAS |
| SEQ ID NO: 620 (IMGT) | LCDR3 | QQRSNWPPALT |
| SEQ ID NO: 625 | VL | EIVLTQSPATLSLSPGERATLSCRASQSVSSYLAWYQQKPGQAPRLLIYDASNRATGIPARFSGSGSGTDFTLTISSLEPEDFAVYYCQQRSNWPPALTFCGGTKVEIK |
| SEQ ID NO: 626 (Combined) | HCDR1 | GGSFSGYYWS |
| SEQ ID NO: 627 (Combined) | HCDR2 | EINHGGYVTYNPSLES |
| SEQ ID NO: 628 (Combined) | HCDR3 | DYGPGNYDWYFDL |
| SEQ ID NO: 629 (Kabat) | HCDR1 | GYYWS |
| SEQ ID NO: 627 (Kabat) | HCDR2 | EINHGGYVTYNPSLES |
| SEQ ID NO: 628 (Kabat) | HCDR3 | DYGPGNYDWYFDL |
| SEQ ID NO: 630 (Chothia) | HCDR1 | GGSFSGY |
| SEQ ID NO: 631 (Chothia) | HCDR2 | NHGGY |
| SEQ ID NO: 628 (Chothia) | HCDR3 | DYGPGNYDWYFDL |
| SEQ ID NO: 632 (IMGT) | HCDR1 | GGSFSGYY |
| SEQ ID NO: 633 (IMGT) | HCDR2 | INHGGYV |
| SEQ ID NO: 634 (IMGT) | HCDR3 | ARDYGPGNYDWYFDL |
| SEQ ID NO: 635 | VH | [sequence omitted] |
| ANTI-IL6RA | | |
| SEQ ID NO: 636 (Combined) | LCDR1 | RASQDISSYLN |
| SEQ ID NO: 637 (Combined) | LCDR2 | YTSRLHS |
| SEQ ID NO: 300 (Combined) | LCDR3 | QQGNTLPYT |
| SEQ ID NO: 636 (Kabat) | LCDR1 | RASQDISSYLN |
| SEQ ID NO: 637 (Kabat) | LCDR2 | YTSRLHS |
| SEQ ID NO: 300 (Kabat) | LCDR3 | QQGNTLPYT |
| SEQ ID NO: 638 (Chothia) | LCDR1 | SQDISSY |
| SEQ ID NO: 639 (Chothia) | LCDR2 | YTS |
| SEQ ID NO: 640 (Chothia) | LCDR3 | GNTLPY |
| SEQ ID NO: 641 (IMGT) | LCDR1 | QDISSY |
| SEQ ID NO: 639 (IMGT) | LCDR2 | YTS |
| SEQ ID NO: 300 (IMGT) | LCDR3 | QQGNTLPYT |
| SEQ ID NO: 642 | VL | [sequence omitted] |
| SEQ ID NO: 643 (Combined) | HCDR1 | GYSITSDHAWS |
| SEQ ID NO: 644 (Combined) | HCDR2 | YISYSGITTYNPSLKS |
| SEQ ID NO: 645 (Combined) | HCDR3 | SLARTTAMDY |
| SEQ ID NO: 646 (Kabat) | HCDR1 | SDHAWS |
| SEQ ID NO: 644 (Kabat) | HCDR2 | YISYSGITTYNPSLKS |
| SEQ ID NO: 645 (Kabat) | HCDR3 | SLARTTAMDY |
| SEQ ID NO: 647 (Chothia) | HCDR1 | GYSITSDH |
| SEQ ID NO: 648 (Chothia) | HCDR2 | SYSGI |
| SEQ ID NO: 645 (Chothia) | HCDR3 | SLARTTAMDY |
| SEQ ID NO: 649 (IMGT) | HCDR1 | GYSITSDHA |
| SEQ ID NO: 650 (IMGT) | HCDR2 | ISYSGIT |
| SEQ ID NO: 651 (IMGT) | HCDR3 | ARSLARTTAMDY |
| SEQ ID NO: 652 | VH | [sequence omitted] |
| ANTI-IL6RB | | |
| SEQ ID NO: 54 (Combined) | LCDR1 | RASQSISSYLN |
| SEQ ID NO: 55 (Combined) | LCDR2 | AASSLQS |
| SEQ ID NO: 653 (Combined) | LCDR3 | QQSYSTPPIT |
| SEQ ID NO: 54 (Kabat) | LCDR1 | RASQSISSYLN |
| SEQ ID NO: 55 (Kabat) | LCDR2 | AASSLQS |
| SEQ ID NO: 653 (Kabat) | LCDR3 | QQSYSTPPIT |
| SEQ ID NO: 57 (Chothia) | LCDR1 | SQSISSY |
| SEQ ID NO: 58 (Chothia) | LCDR2 | AAS |
| SEQ ID NO: 654 (Chothia) | LCDR3 | SYSTPPI |
| SEQ ID NO: 60 (IMGT) | LCDR1 | QSISSY |
| SEQ ID NO: 58 (IMGT) | LCDR2 | AAS |
| SEQ ID NO: 653 (IMGT) | LCDR3 | QQSYSTPPIT |
| SEQ ID NO: 655 | VL | DIQMTQSPSSLSASVGDRVTITCRASQSISSYLNWYQQKPGKAPKLLIYAASSLQSGVPSRFSGSGSGTDFTLTISSLQPEDFATYYCQQSYSTPPITFGQGTRLEIK |
| SEQ ID NO: 656 (Combined) | HCDR1 | GFTFSDYYMT |
| SEQ ID NO: 657 (Combined) | HCDR2 | YISSSGTNKYNADSVKG |
| SEQ ID NO: 658 (Combined) | HCDR3 | DPPWGMDV |
| SEQ ID NO: 659 (Kabat) | HCDR1 | DYYMT |
| SEQ ID NO: 657 (Kabat) | HCDR2 | YISSSGTNKYNADSVKG |
| SEQ ID NO: 658 (Kabat) | HCDR3 | DPPWGMDV |
| SEQ ID NO: 562 (Chothia) | HCDR1 | GFTFSDY |
| SEQ ID NO: 660 (Chothia) | HCDR2 | SSSGTN |
| SEQ ID NO: 658 (Chothia) | HCDR3 | DPPWGMDV |
| SEQ ID NO: 661 (IMGT) | HCDR1 | GFTFSDYY |
| SEQ ID NO: 662 (IMGT) | HCDR2 | ISSSGTNK |
| SEQ ID NO: 663 (IMGT) | HCDR3 | VRDPPWGMDV |
| SEQ ID NO: 664 | VH | QVQLVESGGGLVKPGGSLRLSCAASGFTFSDYYMTWIRQTPGKGLDWVSYISSSGTNKYNADSVKGRFTISRDNAKNSLYLQMNSLRAEDTAVYYCVRDPPWGMDVWGQGTTVTVSS |
| ANTI-CD2 (1) | | |
| SEQ ID NO: 665 (Combined) | LCDR1 | RSSQSLLHSSGNTYLN |
| SEQ ID NO: 666 (Combined) | LCDR2 | LVSKLES |
| SEQ ID NO: 667 (Combined) | LCDR3 | MQFTHYPYT |
| SEQ ID NO: 665 (Kabat) | LCDR1 | RSSQSLLHSSGNTYLN |
| SEQ ID NO: 666 (Kabat) | LCDR2 | LVSKLES |
| SEQ ID NO: 667 (Kabat) | LCDR3 | MQFTHYPYT |
| SEQ ID NO: 668 (Chothia) | LCDR1 | SQSLLHSSGNTY |
| SEQ ID NO: 669 (Chothia) | LCDR2 | LVS |
| SEQ ID NO: 670 (Chothia) | LCDR3 | FTHYPY |
| SEQ ID NO: 671 (IMGT) | LCDR1 | QSLLHSSGNTY |
| SEQ ID NO: 669 (IMGT) | LCDR2 | LVS |
| SEQ ID NO: 667 (IMGT) | LCDR3 | MQFTHYPYT |
| SEQ ID NO: 672 | VL | DVVMTQSPPSLLVTLGQPASISCRSSQSLLHSSGNTYLNWLLQRPGQSPQPLIYLVSKLESGVPDRFSGSGSGTDFTLKISGVEAEDVGVYYCMQFTHYPYTFGQGTKLEIK |
| SEQ ID NO: 673 | LC | DVVMTQSPPSLLVTLGQPASISCRSSQSLLHSSGNTYLNWLLQRPGQSPQPLIYLVSKLESGVPDRFSGSGSGTDFTLKISGVEAEDVGVYYCMQFTHYPYTFGQGTKLEIKRTVAAPSVFIFPPSDEQLKSGTASVVCLLNNFYPREAKVQWKVDNALQSGNSQESVTEQDSKDSTYSLSSTLTLSKADYEKHKVYACEVTHQGLSSPVTKSFNRGEC |
| SEQ ID NO: 674 (Combined) | HCDR1 | GYIFTEYYMY |
| SEQ ID NO: 675 (Combined) | HCDR2 | RIDPEDGSIDYVEKFKK |
| SEQ ID NO: 676 (Combined) | HCDR3 | GKFNYRFAY |
| SEQ ID NO: 677 (Kabat) | HCDR1 | EYYMY |
| SEQ ID NO: 675 (Kabat) | HCDR2 | RIDPEDGSIDYVEKFKK |
| SEQ ID NO: 676 (Kabat) | HCDR3 | GKFNYRFAY |
| SEQ ID NO: 678 (Chothia) | HCDR1 | GYIFTEY |
| SEQ ID NO: 679 (Chothia) | HCDR2 | DPEDGS |
| SEQ ID NO: 676 (Chothia) | HCDR3 | GKFNYRFAY |
| SEQ ID NO: 680 (IMGT) | HCDR1 | GYIFTEYY |
| SEQ ID NO: 681 (IMGT) | HCDR2 | IDPEDGSI |
| SEQ ID NO: 682 (IMGT) | HCDR3 | ARGKFNYRFAY |
| SEQ ID NO: 683 | VH | QVQLVQSGAEVQRPGASVKVSCKASGYIFTEYYMYWVRQAPGQGLELVGRIDPEDGSIDYVEKFKKKVTLTADTSSSTAYMELSSLTSDDTAVYYCARGKFNYRFAYWGQGTLVTVSS |
| SEQ ID NO: 684 | HC | QVQLVQSGAEVQRPGASVKVSCKASGYIFTEYYMYWVRQAPGQGLELVGRIDPEDGSIDYVEKFKKKVTLTADTSSSTAYMELSSLTSDDTAVYYCARGKFNYRFAYWGQGTLVTVSSASTKGPSVFPLAPSSKSTSGGTAALGCLVKDYFPEPVTVSWNSGALTSGVHTFPAVLQSSGLYSLSSVVTVPSSSLGTQTYICNVNHKPSNTKVDKKVEPKSC |

[0553] In some embodiments, the agent that stimulates a CD3/TCR complex and the agent that stimulates a costimulatory molecule and/or growth factor receptor are comprised in a multispecific binding molecule. Thus, contemplated herein are multispecific binding molecules comprising an agent that stimulates a CD3/TCR complex and an agent that stimulates a costimulatory molecule and/or growth factor receptor, such as but not limited to a multispecific binding molecule comprising a CD3 antigen binding domain and one or more of a CD28, ICOS, CD27, CD25, 4-1BB, IL6RA, IL6RB, and/or CD2 antigen binding domain. Non-limiting examples of such binding domains, as noted above, are provided above, for example in Table 27 and the publications incorporated by reference herein.

[0554] In some embodiments, the multispecific binding molecule comprises a CD3 antigen binding domain and a CD28 or CD2 antigen binding domain. In some embodiments, the CD3 antigen binding domain is an anti-CD3 antibody, optionally the anti-CD3 (1), anti-CD3 (2), anti-CD3 (3), or anti-CD3 (4) provided in Table 27, or an antibody fragment comprising one or more CDRs, VH, and/or VL thereof. In some embodiments, the CD28 antigen binding domain is an anti-CD28 antibody, optionally the anti-CD28 (1) or anti-CD28 (2) provided in Table 27, or an antibody fragment comprising one or more CDRs, VH, heavy chain, VL, and/or light chain thereof. In some embodiments, the CD2 antigen binding domain is an anti-CD2 antibody, optionally the anti-CD2 (1), provided in Table 27, or an antibody fragment comprising one or more CDRs, VH, heavy chain, VL, and/or light chain thereof.

[0555] In some embodiments, the multispecific binding molecules comprise one or more heavy and/or light chains. Non-limiting exemplary heavy and light chain sequences that may be comprised in these multispecific binding molecules are provided in Table 28 below. Non-limiting exemplary combinations thereof are suggested in Table 28 based on the categorization of the recited heavy and/or light chains as within a Construct. This Construct organization provides examples of configurations of heavy and/or light chains but further combinations and permutations thereof are also possible.

TABLE 28

Exemplary heavy chain (HC) and light chain (LC) sequences

| SEQ ID No: | Chain | Amino acid sequence |
|---|---|---|
| 701 | Wild type Fc | DKTHTCPPCPAPELLGGPSVFLFPPKPKDTLMISRTPEVTCVVVDVSHEDPEVKFNWYVDGVEVHNAKTKPREEQYNSTYRVVSVLTVLHQDWLNGKEYKCKVSNKALPAPIEKTISKAKGQPREPQVYTLPPSREEMTKNQVSLTCLVKGFYPSDIAVEWESNGQPENNYKTTPPVLDSDGSFFLYSKLTVDKSRWQQGNVFSCSVMHEALHNHYTQKSLSLSPGK |
| 702 | Fc DANAPA | DKTHTCPPCPAPELLGGPSVFLFPPKPKDTLMISRTPEVTCVVVAVSHEDPEVKFNWYVDGVEVHNAKTKPREEQYASTYRVVSVLTVLHQDWLNGKEYKCKVSNKALAAPIEKTISKAKGQPREPQVYTLPPSREEMTKNQVSLTCLVKGFYPSDIAVEWESNGQPENNYKTTPPVLDSDGSFFLYSKLTVDKSRWQQGNVFSCSVMHEALHNHYTQKSLSLSPGK |
| 673 | NEG2042 LC | DVVMTQSPPSLLVTLGQPASISCRSSQSLLHSSGNTYLNWLLQRPGQSPQPLIYLVSKLESGVPDRFSGSGSGTDFTLKISGVEAEDVGVYYCMQFTHYPYTFGQGTKLEIKRTVAAPSVFIFPPSDEQLKSGTASVVCLLNNFYPREAKVQWKVDNALQSGNSQESVTEQDSKDSTYSLSSTLTLSKADYEKHKVYACEVTHQGLSSPVTKSFNRGEC |
| 703 | NEG2042 HC | QVQLVQSGAEVQRPGASVKVSCKASGYIFTEYYMYWVRQAPGQGLELVGRIDPEDGSIDYVEKFKKKVTLTADTSSSTAYMELSSLTSDDTAVYYCARGKFNYRFAYWGQGTLVTVSSASTKGPSVFPLAPSSKSTSGGTAALGCLVKDYFPEPVTVSWNSGALTSGVHTFPAVLQSSGLYSLSSVVTVPSSSLGTQTYICNVNHKPSNTKVDKRVEPKSCDKTHTCPPCPAPELLGGPSVFLFPPKPKDTLMISRTPEVTCVVVAVSHEDPEVKFNWYVDGVEVHNAKTKPREEQYASTYRVVSVLTVLHQDWLNGKEYKCKVSNKALAAPIEKTISKAKGQPREPQVYTLPPSREEMTKNQVSLTCLVKGFYPSDIAVEWESNGQPENNYKTTPPVLDSDGSFFLYSKLTVDKSRWQQGNVFSCSVMHEALHNHYTQKSLSLSPGGGGSGGGGSGGGGSGGGGSQVQLVQSGGGVVQPGRSLRLSCKASGYTFTRYTMHWVRQAPGKGLEWIGYINPSRGYTNYNQKVKDRFTISRDNSKNTAFLQMDSLRPEDTGVYFCARYYDDHYSLDYWGQGTPVTVSSGGGGSGGGGSGGGGSGGGGSDIQMTQSPSSLSASVGDRVTITCSASSSVSYMNWYQQTPGKAPKRWIYDTSKLASGVPSRFSGSGSGTDYTFTISSLQPEDIATYYCQQWSSNPFTFGQGTKLQIT |
| 518 | NEG2043 LC | DIQMTQSPSSLSASVGDRVTITCHASQNIYVWLNWYQQKPGKAPKLLIYKASNLHTGVPSRFSGSGSGTDFTLTISSLQPEDFATYYCQQGQTYPYTFGGGTKVEIKRTVAAPSVFIFPPSDEQLKSGTASVVCLLNNFYPREAKVQWKVDNALQSGNSQESVTEQDSKDSTYSLSSTLTLSKADYEKHKVYACEVTHQGLSSPVTKSFNRGEC |
| 704 | NEG2043 HC | QVQLVQSGAEVKKPGASVKVSCKASGYTFTSYYIHWVRQAPGQGLEWIGCIYPGNVNTNYNEKFKDRATLTVDTSISTAYMELSRLRSDDTAVYFCTRSHYGLDWNFDVWGQGTTVTVSSASTKGPSVFPLAPSSKSTSGGTAALGCLVKDYFPEPVTVSWNSGALTSGVHTFPAVLQSSGLYSLSSVVTVPSSSLGTQTYICNVNHKPSNTKVDKRVEPKSCDKTHTCPPCPAPELLGGPSVFLFPPKPKDTLMISRTPEVTCVVVAVSHEDPEVKFNWYVDGVEVHNAKTKPREEQYASTYRVVSVLTVLHQDWLNGKEYKCKVSNKALAAPIEKTISKAKGQPREPQVYTLPPSREEMTKNQVSLTCLVKGFYPSDIAVEWESNGQPENNYKTTPPVLDSDGSFFLYSKLTVDKSRWQQGNVFSCSVMHEALHNHYTQKSLSLSPGGGGSGGGGSGGGGSGGGGSQVQLVQSGGGVVQPGRSLRLSCKASGYTFTRYTMHWVRQAPGKGLEWIGYINPSRGYTNYNQKVKDRFTISRDNSKNTAFLQMDSLRPEDTGVYFCARYYDDHYSLDYWGQGTPVTVSSGGGGSGGGGSGGGGSGGGGSDIQMTQSPSSLSASVGDRVTITCSASSSVSYMNWYQQTPGKAPKRWIYDTSKLASGVPSRFSGSGSGTDYTFTISSLQPEDIATYYCQQWSSNPFTFGQGTKLQIT |
| 705 | NEG2044 LC | DIVLTQPPSVSGAPGQRVTISCSGSSSNIVSNYVNWYQQLPGTAPKLLIYDNNKRPSGVPDRFSGSKSGTSASLAITGLQSEDEADYYCQSYAIGSYSVVFGGGTKLTVLGQGTKVEIKRTVAAPSVFIFPPSDEQLKSGTASVVCLLNNFYPREAKVQWKVDNALQSGNSQESVTEQDSKDSTYSLSSTLTLSKADYEKHKVYACEVTHQGLSSPVTKSFNRGEC |
| 706 | NEG2044 HC | QVQLVESGGGLVQPGGSLRLSCAASGFTFSTYGMSWVRQAPGKGLEWVSSIFYTGSSTYYADSVKGRFTISRDNSKNTLYLQMNSLRAEDTAVYYCARIGYAGDSKYAIWGQGTLVTVSSASTKGPSVFPLAPSSKSTSGGTAALGCLVKDYFPEPVTVSWNSGALTSGVHTFPAVLQSSGLYSLSSVVTVPSSSLGTQTYICNVNHKPSNTKVDKRVEPKSCDKTHTCPPCPAPELLGGPSVFLFPPKPKDTLMISRTPEVTCVVVAVSHEDPEVKFNWYVDGVEVHNAKTKPREEQYASTYRVVSVLTVLHQDWLNGKEYKCKVSNKALAAPIEKTISKAKGQPREPQVYTLPPSREEMTKNQVSLTCLVKGFYPSDIAVEWESNGQPENNYKTTPPVLDSDGSFFLYSKLTVDKSRWQQGNVFSCSVMHEALHNHYTQKSLSLSPGGGGSGGGGSGGGGSGGGGSQVQLVQSGGGVVQPGRSLRLSCKASGYTFTRYTMHWVRQAPGKGLEWIGYINPSRGYTNYNQKVKDRFTISRDNSKNTAFLQMDSLRPEDTGVYFCARYYDDHYSLDYWGQGTPVTVSSGGGGSGGGGSGGGGSGGGGSDIQMTQSPSSLSASVGDRVTITCSASSSVSYMNWYQQTPGKAPKRWIYDTSKLASGVPSRFSGSGSGTDYTFTISSLQPEDIATYYCQQWSSNPFTFGQGTKLQIT |
| 673 | NEG2050 LC | DVVMTQSPPSLLVTLGQPASISCRSSQSLLHSSGNTYLNWLLQRPGQSPQPLIYLVSKLESGVPDRFSGSGSGTDFTLKISGVEAEDVGVYYCMQFTHYPYTFGQGTKLEIKRTVAAPSVFIFPPSDEQLKSGTASVVCLLNNFYPREAKVQWKVDNALQSGNSQESVTEQDSKDSTYSLSSTLTLSKADYEKHKVYACEVTHQGLSSPVTKSFNRGEC |
| 707 | NEG2050 HC | QVQLVQSGAEVQRPGASVKVSCKASGYIFTEYYMYWVRQAPGQGLELVGRIDPEDGSIDYVEKFKKKVTLTADTSSSTAYMELSSLTSDDTAVYYCARGKFNYRFAYWGQGTLVTVSSASTKGPSVFPLAPSSKSTSGGTAALGCLVKDYFPEPVTVSWNSGALTSGVHTFPAVLQSSGLYSLSSVVTVPSSSLGTQTYICNVNHKPSNTKVDKRVEPKSCDKTHTCPPCPAPELLGGPSVFLFPPKPKDTLMISRTPEVTCVVVAVSHEDPEVKFNWYVDGVEVHNAKTKPREEQYASTYRVVSVLTVLHQDWLNGKEYKCKVSNKALAAPIEKTISKAKGQPREPQVYTLPPSREEMTKNQVSLTCLVKGFYPSDIAVEWESNGQPENNYKTTPPVLDSDGSFFLYSKLTVDKSRWQQGNVFSCSVMHEALHNHYTQKSLSLSPGGGGSGGGGSGGGGSGGGGSEVQLVESGGGLVQPGGSLKLSCAASGFTFNKYAMNWVRQAPGKCLEWVARIRSKYNNYATYYADSVKDRFTISRDDSKNTAYLQMNNLKTEDTAVYYCVRHGNFGNSYISYWAYWGQGTLVTVSSGGGGSGGGGSGGGGSGGGGSQTVVTQEPSLTVSPGGTVTLTCGSSTGAVTSGNYPNWVQQKPGQAPRGLIGGTKFLAPGTPARFSGSLLGGKAALTLSGVQPEDEAEYYCVLWYSNRWVFGCGTKLTVL |
| 673 | NEG2051 LC | DVVMTQSPPSLLVTLGQPASISCRSSQSLLHSSGNTYLNWLLQRPGQSPQPLIYLVSKLESGVPDRFSGSGSGTDFTLKISGVEAEDVGVYYCMQFTHYPYTFGQGTKLEIKRTVAAPSVFIFPPSDEQLKSGTASVVCLLNNFYPREAKVQWKVDNALQSGNSQESVTEQDSKDSTYSLSSTLTLSKADYEKHKVYACEVTHQGLSSPVTKSFNRGEC |
| 708 | NEG2051 HC | QVQLVQSGAEVQRPGASVKVSCKASGYIFTEYYMYWVRQAPGQGLELVGRIDPEDGSIDYVEKFKKKVTLTADTSSSTAYMELSSLTSDDTAVYYCARGKFNYRFAYWGQGTLVTVSSASTKGPSVFPLAPSSKSTSGGTAALGCLVKDYFPEPVTVSWNSGALTSGVHTFPAVLQSSGLYSLSSVVTVPSSSLGTQTYICNVNHKPSNTKVDKRVEPKSCDKTHTCPPCPAPELLGGPSVFLFPPKPKDTLMISRTPEVTCVVVAVSHEDPEVKFNWYVDGVEVHNAKTKPREEQYASTYRVVSVLTVLHQDWLNGKEYKCKVSNKALAAPIEKTISKAKGQPREPQVYTLPPSREEMTKNQVSLTCLVKGFYPSDIAVEWESNGQPENNYKTTPPVLDSDGSFFLYSKLTVDKSRWQQGNVFSCSVMHEALHNHYTQKSLSLSPGGGGSGGGGSGGGGSGGGGSEVQLVESGGGLVQPGGSLKLSCAASGFTFNTYAMNWVRQASGKCLEWVGRIRSKYNNYATYYADSVKDRFTISRDDSKSTLYLQMNSLKTEDTAVYYCVRHGNFGNSYVSWFAYWGQGTLVTVSSGGGGSGGGGSGGGGSQAVVTQEPSLTVSPGGTVTLTCRSSTGAVTTSNYANWVQQKPGQAPRGLIGGTNKRAPWTPARFSGSLLGDKAALTLSGAQPEDEAEYFCALWYSNLWVFGCGTKLTVL |
| 518 | NEG2052 LC | DIQMTQSPSSLSASVGDRVTITCHASQNIYVWLNWYQQKPGKAPKLLIYKASNLHTGVPSRFSGSGSGTDFTLTISSLQPEDFATYYCQQGQTYPYTFGGGTKVEIKRTVAAPSVFIFPPSDEQLKSGTASVVCLLNNFYPREAKVQWKVDNALQSGNSQESVTEQDSKDSTYSLSSTLTLSKADYEKHKVYACEVTHQGLSSPVTKSFNRGEC |
| 709 | NEG2052 HC | QVQLVQSGAEVKKPGASVKVSCKASGYTFTSYYIHWVRQAPGQGLEWIGCIYPGNVNTNYNEKFKDRATLTVDTSISTAYMELSRLRSDDTAVYFCTRSHYGLDWNFDVWGQGTTVTVSSASTKGPSVFPLAPSSKSTSGGTAALGCLVKDYFPEPVTVSWNSGALTSGVHTFPAVLQSSGLYSLSSVVTVPSSSLGTQTYICNVNHKPSNTKVDKRVEPKSCDKTHTCPPCPAPELLGGPSVFLFPPKPKDTLMISRTPEVTCVVVAVSHEDPEVKFNWYVDGVEVHNAKTKPREEQYASTYRVVSVLTVLHQDWLNGKEYKCKVSNKALAAPIEKTISKAKGQPREPQVYTLPPSREEMTKNQVSLTCLVKGFYPSDIAVEWESNGQPENNYKTTPPVLDSDGSFFLYSKLTVDKSRWQQGNVFSCSVMHEALHNHYTQKSLSLSPGGGGSGGGGSGGGGSGGGGSEVQLVESGGGLVQPGGSLKLSCAASGFTFNKYAMNWVRQAPGKCLEWVARIRSKYNNYATYYADSVKDRFTISRDDSKNTAYLQMNNLKTEDTAVYYCVRHGNFGNSYISYWAYWGQGTLVTVSSGGGGSGGGGSGGGGSGGGGSQTVVTQEPSLTVSPGGTVTLTCGSSTGAVTSGNYPNWVQQKPGQAPRGLIGGTKFLAPGTPARFSGSLLGGKAALTLSGVQPEDEAEYYCVLWYSNRWVFGCGTKLTVL |
| 518 | NEG2053 LC | DIQMTQSPSSLSASVGDRVTITCHASQNIYVWLNWYQQKPGKAPKLLIYKASNLHTGVPSRFSGSGSGTDFTLTISSLQPEDFATYYCQQGQTYPYTFGGGTKVEIKRTVAAPSVFIFPPSDEQLKSGTASVVCLLNNFYPREAKVQWKVDNALQSGNSQESVTEQDSKDSTYSLSSTLTLSKADYEKHKVYACEVTHQGLSSPVTKSFNRGEC |
| 710 | NEG2053 HC | QVQLVQSGAEVKKPGASVKVSCKASGYTFTSYYIHWVRQAPGQGLEWIGCIYPGNVNTNYNEKFKDRATLTVDTSISTAYMELSRLRSDDTAVYFCTRSHYGLDWNFDVWGQGTTVTVSSASTKGPSVFPLAPSSKSTSGGTAALGCLVKDYFPEPVTVSWNSGALTSGVHTFPAVLQSSGLYSLSSVVTVPSSSLGTQTYICNVNHKPSNTKVDKRVEPKSCDKTHTCPPCPAPELLGGPSVFLFPPKPKDTLMISRTPEVTCVVVAVSHEDPEVKFNWYVDGVEVHNAKTKPREEQYASTYRVVSVLTVLHQDWLNGKEYKCKVSNKALAAPIEKTISKAKGQPREPQVYTLPPSREEMTKNQVSLTCLVKGFYPSDIAVEWESNGQPENNYKTTPPVLDSDGSFFLYSKLTVDKSRWQQGNVFSCSVMHEALHNHYTQKSLSLSPGGGGSGGGGSGGGGSGGGGSEVQLVESGGGLVQPGGSLKLSCAASGFTFNTYAMNWVRQASGKCLEWVGRIRSKYNNYATYYADSVKDRFTISRDDSKSTLYLQMNSLKTEDTAVYYCVRHGNFGNSYVSWFAYWGQGTLVTVSSGGGGSGGGGSGGGGSQAVVTQEPSLTVSPGGTVTLTCRSSTGAVTTSNYANWVQQKPGQAPRGLIGGTNKRAPWTPARFSGSLLGDKAALTLSGAQPEDEAEYFCALWYSNLWVFGCGTKLTVL |
| 673 | Construct 1 Light Chain | DVVMTQSPPSLLVTLGQPASISCRSSQSLLHSSGNTYLNWLLQRPGQSPQPLIYLVSKLESGVPDRFSGSGSGTDFTLKISGVEAEDVGVYYCMQFTHYPYTFGQGTKLEIKRTVAAPSVFIFPPSDEQLKSGTASVVCLLNNFYPREAKVQWKVDNALQSGNSQESVTEQDSKDSTYSLSSTLTLSKADYEKHKVYACEVTHQGLSSPVTKSFNRGEC |
| 711 | Construct 1 Heavy Chain | QVQLVQSGGGVVQPGRSLRLSCKASGYTFTRYTMHWVRQAPGKGLEWIGYINPSRGYTNYNQKVKDRFTISRDNSKNTAFLQMDSLRPEDTGVYFCARYYDDHYSLDYWGQGTPVTVSSGGGGSGGGGSGGGGSGGGGSDIQMTQSPSSLSASVGDRVTITCSASSSVSYMNWYQQTPGKAPKRWIYDTSKLASGVPSRFSGSGSGTDYTFTISSLQPEDIATYYCQQWSSNPFTFGQGTKLQITGGGGSGGGGSGGGGSGGGGSQVQLVQSGAEVQRPGASVKVSCKASGYIFTEYYMYWVRQAPGQGLELVGRIDPEDGSIDYVEKFKKKVTLTADTSSSTAYMELSSLTSDDTAVYYCARGKFNYRFAYWGQGTLVTVSSASTKGPSVFPLAPSSKSTSGGTAALGCLVKDYFPEPVTVSWNSGALTSGVHTFPAVLQSSGLYSLSSVVTVPSSSLGTQTYICNVNHKPSNTKVDKRVEPKSCDKTHTCPPCPAPELLGGPSVFLFPPKPKDTLMISRTPEVTCVVVDVSHEDPEVKFNWYVDGVEVHNAKTKPREEQYNSTYRVVSVLTVLHQDWLNGKEYKCKVSNKALPAPIEKTISKAKGQPREPQVYTLPPSREEMTKNQVSLTCLVKGFYPSDIAVEWESNGQPENNYKTTPPVLDSDGSFFLYSKLTVDKSRWQQGNVFSCSVMHEALHNHYTQKSLSLSPGK |
| 518 | Construct 2 Light Chain | DIQMTQSPSSLSASVGDRVTITCHASQNIYVWLNWYQQKPGKAPKLLIYKASNLHTGVPSRFSGSGSGTDFTLTISSLQPEDFATYYCQQGQTYPYTFGGGTKVEIKRTVAAPSVFIFPPSDEQLKSGTASVVCLLNNFYPREAKVQWKVDNALQSGNSQESVTEQDSKDSTYSLSSTLTLSKADYEKHKVYACEVTHQGLSSPVTKSFNRGEC |
| 712 | Construct 2 Heavy Chain | QVQLVQSGGGVVQPGRSLRLSCKASGYTFTRYTMHWVRQAPGKGLEWIGYINPSRGYTNYNQKVKDRFTISRDNSKNTAFLQMDSLRPEDTGVYFCARYYDDHYSLDYWGQGTPVTVSSGGGGSGGGGSGGGGSGGGGSDIQMTQSPSSLSASVGDRVTITCSASSSVSYMNWYQQTPGKAPKRWIYDTSKLASGVPSRFSGSGSGTDYTFTISSLQPEDIATYYCQQWSSNPFTFGQGTKLQITGGGGSGGGGSGGGGSGGGGSQVQLVQSGAEVKKPGASVKVSCKASGYTFTSYYIHWVRQAPGQGLEWIGCIYPGNVNTNYNEKFKDRATLTVDTSISTAYMELSRLRSDDTAVYFCTRSHYGLDWNFDVWGQGTTVTVSSASTKGPSVFPLAPSSKSTSGGTAALGCLVKDYFPEPVTVSWNSGALTSGVHTFPAVLQSSGLYSLSSVVTVPSSSLGTQTYICNVNHKPSNTKVDKRVEPKSCDKTHTCPPCPAPELLGGPSVFLFPPKPKDTLMISRTPEVTCVVVDVSHEDPEVKFNWYVDGVEVHNAKTKPREEQYNSTYRVVSVLTVLHQDWLNGKEYKCKVSNKALPAPIEKTISKAKGQPREPQVYTLPPSREEMTKNQVSLTCLVKGFYPSDIAVEWESNGQPENNYKTTPPVLDSDGSFFLYSKLTVDKSRWQQGNVFSCSVMHEALHNHYTQKSLSLSPGK |
| 673 | Construct 3 Light Chain | DVVMTQSPPSLLVTLGQPASISCRSSQSLLHSSGNTYLNWLLQRPGQSPQPLIYLVSKLESGVPDRFSGSGSGTDFTLKISGVEAEDVGVYYCMQFTHYPYTFGQGTKLEIKRTVAAPSVFIFPPSDEQLKSGTASVVCLLNNFYPREAKVQWKVDNALQSGNSQESVTEQDSKDSTYSLSSTLTLSKADYEKHKVYACEVTHQGLSSPVTKSFNRGEC |
| 713 | Construct 3 Heavy Chain | QVQLVQSGAEVQRPGASVKVSCKASGYIFTEYYMYWVRQAPGQGLELVGRIDPEDGSIDYVEKFKKKVTLTADTSSSTAYMELSSLTSDDTAVYYCARGKFNYRFAYWGQGTLVTVSSASTKGPSVFPLAPSSKSTSGGTAALGCLVKDYFPEPVTVSWNSGALTSGVHTFPAVLQSSGLYSLSSVVTVPSSSLGTQTYICNVNHKPSNTKVDKRVEPKSCDKTHTCPPCPAPELLGGPSVFLFPPKPKDTLMISRTPEVTCVVVDVSHEDPEVKFNWYVDGVEVHNAKTKPREEQYNSTYRVVSVLTVLHQDWLNGKEYKCKVSNKALPAPIEKTISKAKGQPREPQVYTLPPSREEMTKNQVSLTCLVKGFYPSDIAVEWESNGQPENNYKTTPPVLDSDGSFFLYSKLTVDKSRWQQGNVFSCSVMHEALHNHYTQKSLSLSPGGGGSGGGGSGGGGSGGGGSQVQLVQSGGGVVQPGRSLRLSCKASGYTFTRYTMHWVRQAPGKGLEWIGYINPSRGYTNYNQKVKDRFTISRDNSKNTAFLQMDSLRPEDTGVYFCARYYDDHYSLDYWGQGTPVTVSSGGGGSGGGGSGGGGSGGGGSDIQMTQSPSSLSASVGDRVTITCSASSSVSYMNWYQQTPGKAPKRWIYDTSKLASGVPSRFSGSGSGTDYTFTISSLQPEDIATYYCQQWSSNPFTFGQGTKLQIT |
| 518 | Construct 4 Light Chain | DIQMTQSPSSLSASVGDRVTITCHASQNIYVWLNWYQQKPGKAPKLLIYKASNLHTGVPSRFSGSGSGTDFTLTISSLQPEDFATYYCQQGQTYPYTFGGGTKVEIKRTVAAPSVFIFPPSDEQLKSGTASVVCLLNNFYPREAKVQWKVDNALQSGNSQESVTEQDSKDSTYSLSSTLTLSKADYEKHKVYACEVTHQGLSSPVTKSFNRGEC |
| 714 | Construct 4 Heavy Chain | QVQLVQSGAEVKKPGASVKVSCKASGYTFTSYYIHWVRQAPGQGLEWIGCIYPGNVNTNYNEKFKDRATLTVDTSISTAYMELSRLRSDDTAVYFCTRSHYGLDWNFDVWGQGTTVTVSSASTKGPSVFPLAPSSKSTSGGTAALGCLVKDYFPEPVTVSWNSGALTSGVHTFPAVLQSSGLYSLSSVVTVPSSSLGTQTYICNVNHKPSNTKVDKRVEPKSCDKTHTCPPCPAPELLGGPSVFLFPPKPKDTLMISRTPEVTCVVVDVSHEDPEVKFNWYVDGVEVHNAKTKPREEQYNSTYRVVSVLTVLHQDWLNGKEYKCKVSNKALPAPIEKTISKAKGQPREPQVYTLPPSREEMTKNQVSLTCLVKGFYPSDIAVEWESNGQPENNYKTTPPVLDSDGSFFLYSKLTVDKSRWQQGNVFSCSVMHEALHNHYTQKSLSLSPGGGGSGGGGSGGGGSGGGGSQVQLVQSGGGVVQPGRSLRLSCKASGYTFTRYTMHWVRQAPGKGLEWIGYINPSRGYTNYNQKVKDRFTISRDNSKNTAFLQMDSLRPEDTGVYFCARYYDDHYSLDYWGQGTPVTVSSGGGGSGGGGSGGGGSGGGGSDIQMTQSPSSLSASVGDRVTITCSASSSVSYMNWYQQTPGKAPKRWIYDTSKLASGVPSRFSGSGSGTDYTFTISSLQPEDIATYYCQQWSSNPFTFGQGTKLQIT |
| 673 | Construct 5 Light Chain | DVVMTQSPPSLLVTLGQPASISCRSSQSLLHSSGNTYLNWLLQRPGQSPQPLIYLVSKLESGVPDRFSGSGSGTDFTLKISGVEAEDVGVYYCMQFTHYPYTFGQGTKLEIKRTVAAPSVFIFPPSDEQLKSGTASVVCLLNNFYPREAKVQWKVDNALQSGNSQESVTEQDSKDSTYSLSSTLTLSKADYEKHKVYACEVTHQGLSSPVTKSFNRGEC |
| 715 | Construct 5 Heavy Chain | QVQLVQSGAEVQRPGASVKVSCKASGYIFTEYYMYWVRQAPGQGLELVGRIDPEDGSIDYVEKFKKKVTLTADTSSSTAYMELSSLTSDDTAVYYCARGKFNYRFAYWGQGTLVTVSSASTKGPSVFPLAPSSKSTSGGTAALGCLVKDYFPEPVTVSWNSGALTSGVHTFPAVLQSSGLYSLSSVVTVPSSSLGTQTYICNVNHKPSNTKVDKRVEPKSCGGGGSGGGGSQVQLVQSGGGVVQPGRSLRLSCKASGYTFTRYTMHWVRQAPGKGLEWIGYINPSRGYTNYNQKVKDRFTISRDNSKNTAFLQMDSLRPEDTGVYFCARYYDDHYSLDYWGQGTPVTVSSGGGGSGGGGSGGGGSGGGGSDIQMTQSPSSLSASVGDRVTITCSASSSVSYMNWYQQTPGKAPKRWIYDTSKLASGVPSRFSGSGSGTDYTFTISSLQPEDIATYYCQQWSSNPFTFGQGTKLQITGGGGSGGGGSGGGGSGGGGSDKTHTCPPCPAPELLGGPSVFLFPPKPKDTLMISRTPEVTCVVVDVSHEDPEVKFNWYVDGVEVHNAKTKPREEQYNSTYRVVSVLTVLHQDWLNGKEYKCKVSNKALPAPIEKTISKAKGQPREPQVYTLPPSREEMTKNQVSLTCLVKGFYPSDIAVEWESNGQPENNYKTTPPVLDSDGSFFLYSKLTVDKSRWQQGNVFSCSVMHEALHNHYTQKSLSLSPGK |
| 518 | Construct 6 Light Chain | DIQMTQSPSSLSASVGDRVTITCHASQNIYVWLNWYQQKPGKAPKLLIYKASNLHTGVPSRFSGSGSGTDFTLTISSLQPEDFATYYCQQGQTYPYTFGGGTKVEIKRTVAAPSVFIFPPSDEQLKSGTASVVCLLNNFYPREAKVQWKVDNALQSGNSQESVTEQDSKDSTYSLSSTLTLSKADYEKHKVYACEVTHQGLSSPVTKSFNRGEC |
| 716 | Construct 6 Heavy Chain | QVQLVQSGAEVKKPGASVKVSCKASGYTFTSYYIHWVRQAPGQGLEWIGCIYPGNVNTNYNEKFKDRATLTVDTSISTAYMELSRLRSDDTAVYFCTRSHYGLDWNFDVWGQGTTVTVSSASTKGPSVFPLAPSSKSTSGGTAALGCLVKDYFPEPVTVSWNSGALTSGVHTFPAVLQSSGLYSLSSVVTVPSSSLGTQTYICNVNHKPSNTKVDKRVEPKSCGGGGSGGGGSQVQLVQSGGGVVQPGRSLRLSCKASGYTFTRYTMHWVRQAPGKGLEWIGYINPSRGYTNYNQKVKDRFTISRDNSKNTAFLQMDSLRPEDTGVYFCARYYDDHYSLDYWGQGTPVTVSSGGGGSGGGGSGGGGSGGGGSDIQMTQSPSSLSASVGDRVTITCSASSSVSYMNWYQQTPGKAPKRWIYDTSKLASGVPSRFSGSGSGTDYTFTISSLQPEDIATYYCQQWSSNPFTFGQGTKLQITGGGGSGGGGSGGGGSGGGGSDKTHTCPPCPAPELLGGPSVFLFPPKPKDTLMISRTPEVTCVVVDVSHEDPEVKFNWYVDGVEVHNAKTKPREEQYNSTYRVVSVLTVLHQDWLNGKEYKCKVSNKALPAPIEKTISKAKGQPREPQVYTLPPSREEMTKNQVSLTCLVKGFYPSDIAVEWESNGQPENNYKTTPPVLDSDGSFFLYSKLTVDKSRWQQGNVFSCSVMHEALHNHYTQKSLSLSPGK |
| 673 | Construct 7 Light Chain | DVVMTQSPPSLLVTLGQPASISCRSSQSLLHSSGNTYLNWLLQRPGQSPQPLIYLVSKLESGVPDRFSGSGSGTDFTLKISGVEAEDVGVYYCMQFTHYPYTFGQGTKLEIKRTVAAPSVFIFPPSDEQLKSGTASVVCLLNNFYPREAKVQWKVDNALQSGNSQESVTEQDSKDSTYSLSSTLTLSKADYEKHKVYACEVTHQGLSSPVTKSFNRGEC |
| 717 | Construct 7 Heavy Chain | QVQLVQSGGGVVQPGRSLRLSCKASGYTFTRYTMHWVRQAPGKGLEWIGYINPSRGYTNYNQKVKDRFTISRDNSKNTAFLQMDSLRPEDTGVYFCARYYDDHYSLDYWGQGTPVTVSSGGGGSGGGGSGGGGSGGGGSDIQMTQSPSSLSASVGDRVTITCSASSSVSYMNWYQQTPGKAPKRWIYDTSKLASGVPSRFSGSGSGTDYTFTISSLQPEDIATYYCQQWSSNPFTFGQGTKLQITGGGGSDKTHTCPPCPAPELLGGPSVFLFPPKPKDTLMISRTPEVTCVVVDVSHEDPEVKFNWYVDGVEVHNAKTKPREEQYNSTYRVVSVLTVLHQDWLNGKEYKCKVSNKALPAPIEKTISKAKGQPREPQVYTLPPSREEMTKNQVSLTCLVKGFYPSDIAVEWESNGQPENNYKTTPPVLDSDGSFFLYSKLTVDKSRWQQGNVFSCSVMHEALHNHYTQKSLSLSPGGGGSGGGGSGGGGSGGGGSQVQLVQSGAEVQRPGASVKVSCKASGYIFTEYYMYWVRQAPGQGLELVGRIDPEDGSIDYVEKFKKKVTLTADTSSSTAYMELSSLTSDDTAVYYCARGKFNYRFAYWGQGTLVTVSSASTKGPSVFPLAPSSKSTSGGTAALGCLVKDYFPEPVTVSWNSGALTSGVHTFPAVLQSSGLYSLSSVVTVPSSSLGTQTYICNVNHKPSNTKVDKRVEPKSC |
| 518 | Construct 8 Light Chain | DIQMTQSPSSLSASVGDRVTITCHASQNIYVWLNWYQQKPGKAPKLLIYKASNLHTGVPSRFSGSGSGTDFTLTISSLQPEDFATYYCQQGQTYPYTFGGGTKVEIKRTVAAPSVFIFPPSDEQLKSGTASVVCLLNNFYPREAKVQWKVDNALQSGNSQESVTEQDSKDSTYSLSSTLTLSKADYEKHKVYACEVTHQGLSSPVTKSFNRGEC |
| 718 | Construct 8 Heavy Chain | QVQLVQSGGGVVQPGRSLRLSCKASGYTFTRYTMHWVRQAPGKGLEWIGYINPSRGYTNYNQKVKDRFTISRDNSKNTAFLQMDSLRPEDTGVYFCARYYDDHYSLDYWGQGTPVTVSSGGGGSGGGGSGGGGSGGGGSDIQMTQSPSSLSASVGDRVTITCSASSSVSYMNWYQQTPGKAPKRWIYDTSKLASGVPSRFSGSGSGTDYTFTISSLQPEDIATYYCQQWSSNPFTFGQGTKLQITGGGGSDKTHTCPPCPAPELLGGPSVFLFPPKPKDTLMISRTPEVTCVVVDVSHEDPEVKFNWYVDGVEVHNAKTKPREEQYNSTYRVVSVLTVLHQDWLNGKEYKCKVSNKALPAPIEKTISKAKGQPREPQVYTLPPSREEMTKNQVSLTCLVKGFYPSDIAVEWESNGQPENNYKTTPPVLDSDGSFFLYSKLTVDKSRWQQGNVFSCSVMHEALHNHYTQKSLSLSPGGGGSGGGGSGGGGSGGGGSQVQLVQSGAEVKKPGASVKVSCKASGYTFTSYYIHWVRQAPGQGLEWIGCIYPGNVNTNYNEKFKDRATLTVDTSISTAYMELSRLRSDDTAVYFCTRSHYGLDWNFDVWGQGTTVTVSSASTKGPSVFPLAPSSKSTSGGTAALGCLVKDYFPEPVTVSWNSGALTSGVHTFPAVLQSSGLYSLSSVVTVPSSSLGTQTYICNVNHKPSNTKVDKRVEPKSC |
| 673 | Construct 9 Light Chain | DVVMTQSPPSLLVTLGQPASISCRSSQSLLHSSGNTYLNWLLQRPGQSPQPLIYLVSKLESGVPDRFSGSGSGTDFTLKISGVEAEDVGVYYCMQFTHYPYTFGQGTKLEIKRTVAAPSVFIFPPSDEQLKSGTASVVCLLNNFYPREAKVQWKVDNALQSGNSQESVTEQDSKDSTYSLSSTLTLSKADYEKHKVYACEVTHQGLSSPVTKSFNRGEC |
| 719 | Construct 9 Heavy Chain 1 | QVQLVQSGAEVQRPGASVKVSCKASGYIFTEYYMYWVRQAPGQGLELVGRIDPEDGSIDYVEKFKKKVTLTADTSSSTAYMELSSLTSDDTAVYYCARGKFNYRFAYWGQGTLVTVSSASTKGPSVFPLAPSSKSTSGGTAALGCLVKDYFPEPVTVSWNSGALTSGVHTFPAVLQSSGLYSLSSVVTVPSSSLGTQTYICNVNHKPSNTKVDKRVEPKSCDKTHTCPPCPAPELLGGPSVFLFPPKPKDTLMISRTPEVTCVVVDVSHEDPEVKFNWYVDGVEVHNAKTKPREEQYNSTYRVVSVLTVLHQDWLNGKEYKCKVSNKALPAPIEKTISKAKGQPREPQVCTLPPSREEMTKNQVSLSCAVKGFYPSDIAVEWESNGQPENNYKTTPPVLDSDGSFFLVSKLTVDKSRWQQGNVFSCSVMHEALHNRFTQKSLSLSPGK |
| 720 | Construct 9 Heavy Chain 2 | QVQLVQSGGGVVQPGRSLRLSCKASGYTFTRYTMHWVRQAPGKGLEWIGYINPSRGYTNYNQKVKDRFTISRDNSKNTAFLQMDSLRPEDTGVYFCARYYDDHYSLDYWGQGTPVTVSSGGGGSGGGGSGGGGSGGGGSDIQMTQSPSSLSASVGDRVTITCSASSSVSYMNWYQQTPGKAPKRWIYDTSKLASGVPSRFSGSGSGTDYTFTISSLQPEDIATYYCQQWSSNPFTFGQGTKLQITGGGGSDKTHTCPPCPAPELLGGPSVFLFPPKPKDTLMISRTPEVTCVVVDVSHEDPEVKFNWYVDGVEVHNAKTKPREEQYNSTYRVVSVLTVLHQDWLNGKEYKCKVSNKALPAPIEKTISKAKGQPREPQVYTLPPCREEMTKNQVSLWCLVKGFYPSDIAVEWESNGQPENNYKTTPPVLDSDGSFFLYSKLTVDKSRWQQGNVFSCSVMHEALHNHYTQKSLSLSPGK |
| 518 | Construct 10 Light Chain | DIQMTQSPSSLSASVGDRVTITCHASQNIYVWLNWYQQKPGKAPKLLIYKASNLHTGVPSRFSGSGSGTDFTLTISSLQPEDFATYYCQQGQTYPYTFGGGTKVEIKRTVAAPSVFIFPPSDEQLKSGTASVVCLLNNFYPREAKVQWKVDNALQSGNSQESVTEQDSKDSTYSLSSTLTLSKADYEKHKVYACEVTHQGLSSPVTKSFNRGEC |
| 721 | Construct 10 Heavy Chain 1 | QVQLVQSGAEVKKPGASVKVSCKASGYTFTSYYIHWVRQAPGQGLEWIGCIYPGNVNTNYNEKFKDRATLTVDTSISTAYMELSRLRSDDTAVYFCTRSHYGLDWNFDVWGQGTTVTVSSASTKGPSVFPLAPSSKSTSGGTAALGCLVKDYFPEPVTVSWNSGALTSGVHTFPAVLQSSGLYSLSSVVTVPSSSLGTQTYICNVNHKPSNTKVDKRVEPKSCDKTHTCPPCPAPELLGGPSVFLFPPKPKDTLMISRTPEVTCVVVDVSHEDPEVKFNWYVDGVEVHNAKTKPREEQYNSTYRVVSVLTVLHQDWLNGKEYKCKVSNKALPAPIEKTISKAKGQPREPQVCTLPPSREEMTKNQVSLSCAVKGFYPSDIAVEWESNGQPENNYKTTPPVLDSDGSFFLVSKLTVDKSRWQQGNVFSCSVMHEALHNRFTQKSLSLSPGK |
| 720 | Construct 10 Heavy Chain 2 | QVQLVQSGGGVVQPGRSLRLSCKASGYTFTRYTMHWVRQAPGKGLEWIGYINPSRGYTNYNQKVKDRFTISRDNSKNTAFLQMDSLRPEDTGVYFCARYYDDHYSLDYWGQGTPVTVSSGGGGSGGGGSGGGGSGGGGSDIQMTQSPSSLSASVGDRVTITCSASSSVSYMNWYQQTPGKAPKRWIYDTSKLASGVPSRFSGSGSGTDYTFTISSLQPEDIATYYCQQWSSNPFTFGQGTKLQITGGGGSDKTHTCPPCPAPELLGGPSVFLFPPKPKDTLMISRTPEVTCVVVDVSHEDPEVKFNWYVDGVEVHNAKTKPREEQYNSTYRVVSVLTVLHQDWLNGKEYKCKVSNKALPAPIEKTISKAKGQPREPQVYTLPPCREEMTKNQVSLWCLVKGFYPSDIAVEWESNGQPENNYKTTPPVLDSDGSFFLYSKLTVDKSRWQQGNVFSCSVMHEALHNHYTQKSLSLSPGK |
| 722 | Construct 11 Heavy Chain 1 | DKTHTCPPCPAPELLGGPSVFLFPPKPKDTLMISRTPEVTCVVVDVSHEDPEVKFNWYVDGVEVHNAKTKPREEQYNSTYRVVSVLTVLHQDWLNGKEYKCKVSNKALPAPIEKTISKAKGQPREPQVCTLPPSREEMTKNQVSLSCAVKGFYPSDIAVEWESNGQPENNYKTTPPVLDSDGSFFLVSKLTVDKSRWQQGNVFSCSVMHEALHNRFTQKSLSLSPGK |
| 720 | Construct 11 Heavy Chain 2 | QVQLVQSGGGVVQPGRSLRLSCKASGYTFTRYTMHWVRQAPGKGLEWIGYINPSRGYTNYNQKVKDRFTISRDNSKNTAFLQMDSLRPEDTGVYFCARYYDDHYSLDYWGQGTPVTVSSGGGGSGGGGSGGGGSGGGGSDIQMTQSPSSLSASVGDRVTITCSASSSVSYMNWYQQTPGKAPKRWIYDTSKLASGVPSRFSGSGSGTDYTFTISSLQPEDIATYYCQQWSSNPFTFGQGTKLQITGGGGSDKTHTCPPCPAPELLGGPSVFLFPPKPKDTLMISRTPEVTCVVVDVSHEDPEVKFNWYVDGVEVHNAKTKPREEQYNSTYRVVSVLTVLHQDWLNGKEYKCKVSNKALPAPIEKTISKAKGQPREPQVYTLPPCREEMTKNQVSLWCLVKGFYPSDIAVEWESNGQPENNYKTTPPVLDSDGSFFLYSKLTVDKSRWQQGNVFSCSVMHEALHNHYTQKSLSLSPGK |
| 673 | Construct 12 Light Chain | DVVMTQSPPSLLVTLGQPASISCRSSQSLLHSSGNTYLNWLLQRPGQSPQPLIYLVSKLESGVPDRFSGSGSGTDFTLKISGVEAEDVGVYYCMQFTHYPYTFGQGTKLEIKRTVAAPSVFIFPPSDEQLKSGTASVVCLLNNFYPREAKVQWKVDNALQSGNSQESVTEQDSKDSTYSLSSTLTLSKADYEKHKVYACEVTHQGLSSPVTKSFNRGEC |
| 719 | Construct 12 Heavy Chain 1 | QVQLVQSGAEVQRPGASVKVSCKASGYIFTEYYMYWVRQAPGQGLELVGRIDPEDGSIDYVEKFKKKVTLTADTSSSTAYMELSSLTSDDTAVYYCARGKFNYRFAYWGQGTLVTVSSASTKGPSVFPLAPSSKSTSGGTAALGCLVKDYFPEPVTVSWNSGALTSGVHTFPAVLQSSGLYSLSSVVTVPSSSLGTQTYICNVNHKPSNTKVDKRVEPKSCDKTHTCPPCPAPELLGGPSVFLFPPKPKDTLMISRTPEVTCVVVDVSHEDPEVKFNWYVDGVEVHNAKTKPREEQYNSTYRVVSVLTVLHQDWLNGKEYKCKVSNKALPAPIEKTISKAKGQPREPQVCTLPPSREEMTKNQVSLSCAVKGFYPSDIAVEWESNGQPENNYKTTPPVLDSDGSFFLVSKLTVDKSRWQQGNVFSCSVMHEALHNRFTQKSLSLSPGK |
| 723 | Construct 12 Heavy Chain 2 | QVQLVQSGGGVVQPGRSLRLSCKASGYTFTRYTMHWVRQAPGKGLEWIGYINPSRGYTNYNQKVKDRFTISRDNSKNTAFLQMDSLRPEDTGVYFCARYYDDHYSLDYWGQGTPVTVSSGGGGSGGGGSGGGGSGGGGSDIQMTQSPSSLSASVGDRVTITCSASSSVSYMNWYQQTPGKAPKRWIYDTSKLASGVPSRFSGSGSGTDYTFTISSLQPEDIATYYCQQWSSNPFTFGQGTKLQITGGGGSDKTHTCPPCPAPELLGGPSVFLFPPKPKDTLMISRTPEVTCVVVDVSHEDPEVKFNWYVDGVEVHNAKTKPREEQYNSTYRVVSVLTVLHQDWLNGKEYKCKVSNKALPAPIEKTISKAKGQPREPQVYTLPPCREEMTKNQVSLWCLVKGFYPSDIAVEWESNGQPENNYKTTPPVLDSDGSFFLYSKLTVDKSRWQQGNVFSCSVMHEALHNHYTQKSLSLSPGGGGGSGGGGSGGGGSEEDPCACESLVKFQAKVEGLLQALTRKLEAVSKRLAILENTVV |
| 518 | Construct 13 Light Chain | DIQMTQSPSSLSASVGDRVTITCHASQNIYVWLNWYQQKPGKAPKLLIYKASNLHTGVPSRFSGSGSGTDFTLTISSLQPEDFATYYCQQGQTYPYTFGGGTKVEIKRTVAAPSVFIFPPSDEQLKSGTASVVCLLNNFYPREAKVQWKVDNALQSGNSQESVTEQDSKDSTYSLSSTLTLSKADYEKHKVYACEVTHQGLSSPVTKSFNRGEC |
| 721 | Construct 13 Heavy Chain 1 | QVQLVQSGAEVKKPGASVKVSCKASGYTFTSYYIHWVRQAPGQGLEWIGCIYPGNVNTNYNEKFKDRATLTVDTSISTAYMELSRLRSDDTAVYFCTRSHYGLDWNFDVWGQGTTVTVSSASTKGPSVFPLAPSSKSTSGGTAALGCLVKDYFPEPVTVSWNSGALTSGVHTFPAVLQSSGLYSLSSVVTVPSSSLGTQTYICNVNHKPSNTKVDKRVEPKSCDKTHTCPPCPAPELLGGPSVFLFPPKPKDTLMISRTPEVTCVVVDVSHEDPEVKFNWYVDGVEVHNAKTKPREEQYNSTYRVVSVLTVLHQDWLNGKEYKCKVSNKALPAPIEKTISKAKGQPREPQVCTLPPSREEMTKNQVSLSCAVKGFYPSDIAVEWESNGQPENNYKTTPPVLDSDGSFFLVSKLTVDKSRWQQGNVFSCSVMHEALHNRFTQKSLSLSPGK |
| 723 | Construct 13 Heavy Chain 2 | QVQLVQSGGGVVQPGRSLRLSCKASGYTFTRYTMHWVRQAPGKGLEWIGYINPSRGYTNYNQKVKDRFTISRDNSKNTAFLQMDSLRPEDTGVYFCARYYDDHYSLDYWGQGTPVTVSSGGGGSGGGGSGGGGSGGGGSDIQMTQSPSSLSASVGDRVTITCSASSSVSYMNWYQQTPGKAPKRWIYDTSKLASGVPSRFSGSGSGTDYTFTISSLQPEDIATYYCQQWSSNPFTFGQGTKLQITGGGGSDKTHTCPPCPAPELLGGPSVFLFPPKPKDTLMISRTPEVTCVVVDVSHEDPEVKFNWYVDGVEVHNAKTKPREEQYNSTYRVVSVLTVLHQDWLNGKEYKCKVSNKALPAPIEKTISKAKGQPREPQVYTLPPCREEMTKNQVSLWCLVKGFYPSDIAVEWESNGQPENNYKTTPPVLDSDGSFFLYSKLTVDKSRWQQGNVFSCSVMHEALHNHYTQKSLSLSPGGGGGSGGGGSGGGGSEEDPCACESLVKFQAKVEGLLQALTRKLEAVSKRLAILENTVV |
| 722 | Construct 14 Heavy Chain 1 | DKTHTCPPCPAPELLGGPSVFLFPPKPKDTLMISRTPEVTCVVVDVSHEDPEVKFNWYVDGVEVHNAKTKPREEQYNSTYRVVSVLTVLHQDWLNGKEYKCKVSNKALPAPIEKTISKAKGQPREPQVCTLPPSREEMTKNQVSLSCAVKGFYPSDIAVEWESNGQPENNYKTTPPVLDSDGSFFLVSKLTVDKSRWQQGNVFSCSVMHEALHNRFTQKSLSLSPGK |
| 723 | Construct 14 Heavy Chain 2 | QVQLVQSGGGVVQPGRSLRLSCKASGYTFTRYTMHWVRQAPGKGLEWIGYINPSRGYTNYNQKVKDRFTISRDNSKNTAFLQMDSLRPEDTGVYFCARYYDDHYSLDYWGQGTPVTVSSGGGGSGGGGSGGGGSGGGGSDIQMTQSPSSLSASVGDRVTITCSASSSVSYMNWYQQTPGKAPKRWIYDTSKLASGVPSRFSGSGSGTDYTFTISSLQPEDIATYYCQQWSSNPFTFGQGTKLQITGGGGSDKTHTCPPCPAPELLGGPSVFLFPPKPKDTLMISRTPEVTCVVVDVSHEDPEVKFNWYVDGVEVHNAKTKPREEQYNSTYRVVSVLTVLHQDWLNGKEYKCKVSNKALPAPIEKTISKAKGQPREPQVYTLPPCREEMTKNQVSLWCLVKGFYPSDIAVEWESNGQPENNYKTTPPVLDSDGSFFLYSKLTVDKSRWQQGNVFSCSVMHEALHNHYTQKSLSLSPGGGGGSGGGGSGGGGSEEDPCACESLVKFQAKVEGLLQALTRKLEAVSKRLAILENTVV |
| 673 | Construct 15 Light Chain | DVVMTQSPPSLLVTLGQPASISCRSSQSLLHSSGNTYLNWLLQRPGQSPQPLIYLVSKLESGVPDRFSGSGSGTDFTLKISGVEAEDVGVYYCMQFTHYPYTFGQGTKLEIKRTVAAPSVFIFPPSDEQLKSGTASVVCLLNNFYPREAKVQWKVDNALQSGNSQESVTEQDSKDSTYSLSSTLTLSKADYEKHKVYACEVTHQGLSSPVTKSFNRGEC |
| 719 | Construct 15 Heavy Chain 1 | QVQLVQSGAEVQRPGASVKVSCKASGYIFTEYYMYWVRQAPGQGLELVGRIDPEDGSIDYVEKFKKKVTLTADTSSSTAYMELSSLTSDDTAVYYCARGKFNYRFAYWGQGTLVTVSSASTKGPSVFPLAPSSKSTSGGTAALGCLVKDYFPEPVTVSWNSGALTSGVHTFPAVLQSSGLYSLSSVVTVPSSSLGTQTYICNVNHKPSNTKVDKRVEPKSCDKTHTCPPCPAPELLGGPSVFLFPPKPKDTLMISRTPEVTCVVVDVSHEDPEVKFNWYVDGVEVHNAKTKPREEQYNSTYRVVSVLTVLHQDWLNGKEYKCKVSNKALPAPIEKTISKAKGQPREPQVCTLPPSREEMTKNQVSLSCAVKGFYPSDIAVEWESNGQPENNYKTTPPVLDSDGSFFLVSKLTVDKSRWQQGNVFSCSVMHEALHNRFTQKSLSLSPGK |
| 724 | Construct 15 Heavy Chain 2 | QVQLVQSGGGVVQPGRSLRLSCKASGYTFTRYTMHWVRQAPGKGLEWIGYINPSRGYTNYNQKVKDRFTISRDNSKNTAFLQMDSLRPEDTGVYFCARYYDDHYSLDYWGQGTPVTVSSGGGGSGGGGSGGGGSGGGGSDIQMTQSPSSLSASVGDRVTITCSASSSVSYMNWYQQTPGKAPKRWIYDTSKLASGVPSRFSGSGSGTDYTFTISSLQPEDIATYYCQQWSSNPFTFGQGTKLQITGGGGSDKTHTCPPCPAPELLGGPSVFLFPPKPKDTLMISRTPEVTCVVVDVSHEDPEVKFNWYVDGVEVHNAKTKPREEQYNSTYRVVSVLTVLHQDWLNGKEYKCKVSNKALPAPIEKTISKAKGQPREPQVYTLPPCREEMTKNQVSLWCLVKGFYPSDIAVEWESNGQPENNYKTTPPVLDSDGSFFLYSKLTVDKSRWQQGNVFSCSVMHEALHNHYTQKSLSLSPGGGGGSDLGPQMLRELQETNAALQDVRELLRQQVREITFLKNTVMECDACGMQQ |
| 518 | Construct 16 Light Chain | DIQMTQSPSSLSASVGDRVTITCHASQNIYVWLNWYQQKPGKAPKLLIYKASNLHTGVPSRFSGSGSGTDFTLTISSLQPEDFATYYCQQGQTYPYTFGGGTKVEIKRTVAAPSVFIFPPSDEQLKSGTASVVCLLNNFYPREAKVQWKVDNALQSGNSQESVTEQDSKDSTYSLSSTLTLSKADYEKHKVYACEVTHQGLSSPVTKSFNRGEC |
| 721 | Construct 16 Heavy Chain 1 | QVQLVQSGAEVKKPGASVKVSCKASGYTFTSYYIHWVRQAPGQGLEWIGCIYPGNVNTNYNEKFKDRATLTVDTSISTAYMELSRLRSDDTAVYFCTRSHYGLDWNFDVWGQGTTVTVSSASTKGPSVFPLAPSSKSTSGGTAALGCLVKDYFPEPVTVSWNSGALTSGVHTFPAVLQSSGLYSLSSVVTVPSSSLGTQTYICNVNHKPSNTKVDKRVEPKSCDKTHTCPPCPAPELLGGPSVFLFPPKPKDTLMISRTPEVTCVVVDVSHEDPEVKFNWYVDGVEVHNAKTKPREEQYNSTYRVVSVLTVLHQDWLNGKEYKCKVSNKALPAPIEKTISKAKGQPREPQVCTLPPSREEMTKNQVSLSCAVKGFYPSDIAVEWESNGQPENNYKTTPPVLDSDGSFFLVSKLTVDKSRWQQGNVFSCSVMHEALHNRFTQKSLSLSPGK |
| 724 | Construct 16 Heavy Chain 2 | QVQLVQSGGGVVQPGRSLRLSCKASGYTFTRYTMHWVRQAPGKGLEWIGYINPSRGYTNYNQKVKDRFTISRDNSKNTAFLQMDSLRPEDTGVYFCARYYDDHYSLDYWGQGTPVTVSSGGGGSGGGGSGGGGSGGGGSDIQMTQSPSSLSASVGDRVTITCSASSSVSYMNWYQQTPGKAPKRWIYDTSKLASGVPSRFSGSGSGTDYTFTISSLQPEDIATYYCQQWSSNPFTFGQGTKLQITGGGGSDKTHTCPPCPAPELLGGPSVFLFPPKPKDTLMISRTPEVTCVVVDVSHEDPEVKFNWYVDGVEVHNAKTKPREEQYNSTYRVVSVLTVLHQDWLNGKEYKCKVSNKALPAPIEKTISKAKGQPREPQVYTLPPCREEMTKNQVSLWCLVKGFYPSDIAVEWESNGQPENNYKTTPPVLDSDGSFFLYSKLTVDKSRWQQGNVFSCSVMHEALHNHYTQKSLSLSPGGGGGSDLGPQMLRELQETNAALQDVRELLRQQVREITFLKNTVMECDACGMQQ |
| 722 | Construct 17 Heavy Chain 1 | DKTHTCPPCPAPELLGGPSVFLFPPKPKDTLMISRTPEVTCVVVDVSHEDPEVKFNWYVDGVEVHNAKTKPREEQYNSTYRVVSVLTVLHQDWLNGKEYKCKVSNKALPAPIEKTISKAKGQPREPQVCTLPPSREEMTKNQVSLSCAVKGFYPSDIAVEWESNGQPENNYKTTPPVLDSDGSFFLVSKLTVDKSRWQQGNVFSCSVMHEALHNRFTQKSLSLSPGK |
| 724 | Construct 17 Heavy Chain 2 | QVQLVQSGGGVVQPGRSLRLSCKASGYTFTRYTMHWVRQAPGKGLEWIGYINPSRGYTNYNQKVKDRFTISRDNSKNTAFLQMDSLRPEDTGVYFCARYYDDHYSLDYWGQGTPVTVSSGGGGSGGGGSGGGGSGGGGSDIQMTQSPSSLSASVGDRVTITCSASSSVSYMNWYQQTPGKAPKRWIYDTSKLASGVPSRFSGSGSGTDYTFTISSLQPEDIATYYCQQWSSNPFTFGQGTKLQITGGGGSDKTHTCPPCPAPELLGGPSVFLFPPKPKDTLMISRTPEVTCVVVDVSHEDPEVKFNWYVDGVEVHNAKTKPREEQYNSTYRVVSVLTVLHQDWLNGKEYKCKVSNKALPAPIEKTISKAKGQPREPQVYTLPPCREEMTKNQVSLWCLVKGFYPSDIAVEWESNGQPENNYKTTPPVLDSDGSFFLYSKLTVDKSRWQQGNVFSCSVMHEALHNHYTQKSLSLSPGGGGGSDLGPQMLRELQETNAALQDVRELLRQQVREITFLKNTVMECDACGMQQ |

[0556] In some embodiments, the multispecific binding molecule comprises a bispecific antibody. In some embodiments, the bispecific antibody is configured in any one of the schema provided in FIG. 50A, FIGS. 51A-51B, and FIGS. 61A-61B, and FIGS. 63A-63B. In some embodiments, the bispecific antibody is monovalent or bivalent. In some embodiments, the bispecific antibody comprises an Fc region. In some embodiments, the Fc region of the bispecific antibody is silenced.

[0557] In some embodiments, the multispecific binding molecule comprises a plurality of bispecific antibodies. In some embodiments, one or more of the plurality of bispecific antibodies is monovalent. In some embodiments, one or more of the plurality of bispecific antibodies comprises an Fc region. In some embodiments, the Fc region of the one or more of the plurality of bispecific antibodies is silenced. In some embodiments, one or more of the plurality of bispecific antibodies are conjugated together into a multimer. In some embodiments, the multimer is configured in any one of the schema provided in FIG. 50B and FIG. 51B.

[0558] In some embodiments, a multispecific binding molecule described herein comprises an Fc region, e.g., wherein the Fc region is Fc silent. In some embodiments, the Fc region comprises a mutation at one or more of (e.g., all of) D265, N297, and P329. In some embodiments, the Fc region comprises the mutations D265A, N297A, and P329A (DANAPA).

[0559] In some embodiments, a multispecific binding molecule described herein comprises a first binding domain and a second binding domain. For instance, the first binding domain may be an anti-CD3 binding domain and the second binding domain may be a costimulatory molecule binding domain, or the first binding domain may be a costimulatory molecule binding domain and the second binding domain may be an anti-CD3 binding domain. In some embodiments, the costimulatory molecule binding domain binds to CD2, CD28, CD25, CD27, IL6Rb, ICOS, or 41BB. In some embodiments, the costimulatory molecule binding domain activates CD2, CD28, CD25, CD27, IL6Rb, ICOS, or 41BB. In some embodiments, a multispecific binding molecule described herein comprises an Fc region that is mutated to have reduced binding to Fc receptor or reduced ADCC, ADCP, or CDC activity, e.g., an Fc region comprising the mutations D265A, N297A, and P329A (DANAPA).

[0560] In some embodiments, the first binding domain (e.g., an scFv) is N-terminal of the VH of the second binding domain (e.g., a Fab fragment), e.g., linked via a peptide linker. In some embodiments, the multispecific binding molecule further comprises one or more of (e.g., all of) a CH1, CH2, and CH3, e.g., in order from N-terminal to C-terminal. In some embodiments, a polypeptide of the multispecific binding molecule comprises the following sequences, from N-terminal to C-terminal: VH of the first binding domain, first peptide linker (e.g., a (G4S)4 linker), VL of first binding domain, second peptide linker (e.g., a (G4S)4 linker), VH of the second binding domain, CH1, CH2, and CH3. In some embodiments, a polypeptide of the multispecific binding molecule comprises the following sequences: from N-terminal to C-terminal: VL of the second binding domain and CL. In some embodiments, the multispecific binding molecule comprises an Fc region that is mutated to have reduced binding to Fc receptor or reduced ADCC, ADCP, or CDC activity, e.g., an Fc region comprising the mutations D265A, N297A, and P329A (DANAPA). In some embodiments, the first binding fragment comprises an anti-CD3 binding domain, e.g., an anti-CD3 scFv, e.g., comprising an anti-CD3 sequence disclosed in Table 27. In some embodiments, the second binding domain comprises a costimulatory molecule binding domain, e.g., an anti-CD2 binding domain, e.g., an anti-CD2 Fab, e.g., comprising an anti-CD2 sequence disclosed in Table 27. In some embodiments, the second binding domain comprises a costimulatory molecule binding domain, e.g., an anti-CD28 binding domain, e.g., an anti-CD28 Fab, e.g., comprising an anti-CD28 sequence disclosed in Table 27. In some embodiments, the first binding fragment comprises a costimulatory molecule binding domain, e.g., an anti-CD2 or anti-CD28 binding domain, e.g., an anti-CD2 or anti-CD28 scFv, e.g., comprising an anti-CD2 or anti-CD28 sequence disclosed in Table 27. In some embodiments, the second binding domain comprises an anti-CD3 binding domain, e.g., an anti-CD3 Fab, e.g., comprising an anti-CD3 sequence disclosed in Table 27. Examples of such multispecific binding molecules are depicted as the top left construct in FIG. 50A; Construct 1 or Construct 2 in FIG. 51A; and Construct 1 or Construct 2 in Table 28.

[0561] In some embodiments, the first binding domain (e.g., a Fab fragment) is N-terminal to a second binding domain (e.g., an scFv), e.g., wherein an Fc region is situated between the first and second binding domain. In some embodiments, the Fc region is mutated to have reduced binding to Fc receptor or reduced ADCC, ADCP, or CDC activity, e.g., an Fc region comprising the mutations D265A, N297A, and P329A (DANAPA). In some embodiments, the multispecific binding molecule further comprises one or more of (e.g., all of) a CH1, CH2, and CH3, e.g., in order from N-terminal to C-terminal. In some embodiments, a polypeptide of the multispecific binding molecule comprises the following sequences, from N-terminal to C-terminal: VH of the first binding domain, CH1, CH2, CH3, first peptide linker (e.g., a (G4S)4 linker), VH of second binding domain, second peptide linker (e.g., a (G4S)4 linker), and VL of the second binding domain. In some embodiments, a polypeptide of the multispecific binding molecule comprises the following sequences: from N-terminal to C-terminal: VL of the first binding domain and CL. In some embodiments, the first binding domain comprises a costimulatory molecule binding domain, e.g., an anti-CD2 binding domain, e.g., an anti-CD2 Fab, e.g., comprising an anti-CD2 sequence disclosed in Table 27. In some embodiments, the first binding domain comprises a costimulatory molecule binding domain, e.g., an anti-CD28 binding domain, e.g., an anti-CD28 Fab, e.g., comprising an anti-CD28 sequence disclosed in Table 27, e.g., anti-CD28 (1) or anti-CD28 (2). In some embodiments, the second binding domain comprises an anti-CD3 binding domain, e.g., an anti-CD3 scFv, e.g., comprising an anti-CD3 sequence disclosed in Table 27, e.g., anti-CD3 (1), anti-CD3 (2), anti-CD3 (3), or anti-CD3 (4). In some embodiments, the first binding domain comprises an anti-CD3 binding domain, e.g., an anti-CD3 Fab, e.g., comprising an anti-CD3 sequence disclosed in Table 27, e.g., anti-CD3 (1), anti-CD3 (2), anti-CD3 (3), or anti-CD3 (4). In some embodiments, the second binding domain comprises a costimulatory molecule binding domain, e.g., an anti-CD2 or anti-CD28 binding domain, e.g., an anti-CD2 or anti-CD28 scFv, e.g., comprising an anti-CD2 or anti-CD28 sequence disclosed in Table 27. Examples of such multispecific binding molecules are depicted as the second construct from the left in the top row of FIG. 50A; Construct 3 or Construct 4 in FIG. 51A; and Construct 3 or Construct 4 in Table 28.

[0562] In some embodiments, the first binding domain (e.g., a Fab fragment) is N terminal to a second binding domain (e.g., a scFv), e.g., via a peptide linker. In some embodiments, the multispecific binding molecule further comprises one or more of (e.g., all of) a CH1, CH2, and CH3, e.g., in order from N-terminal to C-terminal. In some embodiments, a polypeptide of the multispecific binding molecule comprises the following sequences, from N-terminal to C-terminal: VH of the first binding domain, CH1, first peptide linker (e.g., a (G4S)2 linker), VH of the second binding domain, second peptide linker (e.g., a (G4S)4 linker), VL of the second binding domain, third peptide linker (e.g., a (G4S)4 linker), CH2, and CH3. In some embodiments, a polypeptide of the multispecific binding molecule comprises the following sequences: from N-terminal to C-terminal: VL of the first binding domain and CL. In some embodiments, the multispecific binding molecule comprises an Fc region that is mutated to have reduced binding to Fc receptor or reduced ADCC, ADCP, or CDC activity, e.g., an Fc region comprising the mutations D265A, N297A, and P329A (DANAPA). In some embodiments, the first binding domain comprises a costimulatory molecule binding domain, e.g., an anti-CD2 binding domain, e.g., an anti-CD2 Fab, e.g., comprising an anti-CD2 sequence disclosed in Table 27. In some embodiments, the first binding domain comprises a costimulatory molecule binding domain, e.g., an anti-CD28 binding domain, e.g., an anti-CD28 Fab, e.g., comprising an anti-CD28 sequence disclosed in Table 27, e.g., anti-CD28 (1) or anti-CD28 (2). In some embodiments, the first binding domain comprises a costimulatory molecule binding domain, e.g., an anti-CD25 binding domain (for example, an anti-CD25 Fab), an anti-CD27 binding domain (for example, an anti-CD27 Fab), an anti-IL6Rb binding domain (for example, an anti-IL6Rb Fab), an anti-ICOS binding domain (for example, an anti-ICOS Fab), or an anti-41BB binding domain (for example, an anti-41BB Fab). In some embodiments, the second binding domain comprises an anti-CD3 binding domain, e.g., an anti-CD3 scFv, e.g., comprising an anti-CD3 sequence disclosed in Table 27, e.g., anti-CD3 (1), anti-CD3 (2), anti-CD3 (3), or anti-CD3 (4). In some embodiments, the first binding domain comprises an anti-CD3 binding domain, e.g., an anti-CD3 Fab, e.g., comprising an anti-CD3 sequence disclosed in Table 27, e.g., anti-CD3 (1), anti-CD3 (2), anti-CD3 (3), or anti-CD3 (4). In some embodiments, the second binding domain comprises a costimulatory molecule binding domain, e.g., an anti-CD2 binding domain (for example, an anti-CD2 scFv), an anti-CD28 binding domain (for example, an anti-CD28 scFv), an anti-CD25 binding domain (for example, an anti-CD25 scFv), an anti-CD27 binding domain (for example, an anti-CD27 scFv), an anti-IL6Rb binding domain (for example, an anti-IL6Rb scFv), an anti-ICOS binding domain (for example, an anti-ICOS scFv), or an anti-41BB binding domain (for example, an anti-41BB scFv). Examples of such multispecific binding molecules are depicted as the third construct from the left in the top row of FIG. 50A; Construct 5 or Construct 6 in FIG. 51A; and Construct 5 or Construct 6 in Table 28.

[0563] In some embodiments, the first binding domain (e.g., an scFv) is N-terminal to a second binding domain (e.g., a Fab fragment), e.g., wherein an Fc region is situated between the first and second binding domain. In some embodiments, the Fc region is mutated to have reduced binding to Fc receptor or reduced ADCC, ADCP, or CDC activity, e.g., an Fc region comprising the mutations D265A, N297A, and P329A (DANAPA). In some embodiments, the multispecific binding molecule further comprises one or more of (e.g., all of) a CH2, CH3, and CH1, e.g., in order from N-terminal to C-terminal. In some embodiments, a polypeptide of the multispecific binding molecule comprises the following sequences, from N-terminal to C-terminal: VH of the first binding domain, first peptide linker (e.g., a (G4S)4 linker), VL of the first binding domain, second peptide linker (e.g., a (G4S) linker), CH2, CH3, third peptide linker (e.g., a (G4S)4 linker), VH of the second binding domain, and CH1. In some embodiments, a polypeptide of the multispecific binding molecule comprises the following sequences: from N-terminal to C-terminal: VL of the second binding domain and CL. In some embodiments, the first binding domain comprises an anti-CD3 binding domain, e.g., an anti-CD3 scFv, e.g., comprising an anti-CD3 sequence disclosed in Table 27. In some embodiments, the second binding domain comprises a costimulatory molecule binding domain, e.g., an anti-CD2 binding domain, e.g., an anti-CD2 Fab, e.g., comprising an anti-CD2 sequence disclosed in Table 27. In some embodiments, the second binding domain comprises a costimulatory molecule binding domain, e.g., an anti-CD28 binding domain, e.g., an anti-CD28 Fab, e.g., comprising an anti-CD28 sequence disclosed in Table 27. In some embodiments, the first binding domain comprises a costimulatory molecule binding domain, e.g., an anti-CD2 or anti-CD28 binding domain, e.g., an anti-CD2 or anti-CD28 scFv, e.g., comprising an anti-CD2 or anti-CD28 sequence disclosed in Table 27. In some embodiments, the second binding domain comprises an anti-CD3 binding domain, e.g., an anti-CD3 Fab, e.g., comprising an anti-CD3 sequence disclosed in Table 27. Examples of such multispecific binding molecules are depicted as the rightmost construct in the top row of FIG. 50A; Construct 7 or Construct 8 in FIG. 51A; and Construct 7 or Construct 8 in Table 28.

[0564] In some embodiments, the first binding domain (e.g., a Fab fragment) is situated N terminal to a first Fc region. In some embodiments, the multispecific binding molecule comprises one or more of (e.g., all of) a first CH1, a first CH2, and a first CH3, e.g., in order from N-terminal to C-terminal. In some embodiments, the second binding domain (e.g., an scFv) is situated N terminal to a second Fc region, e.g., in a second polypeptide chain. In some embodiments, the multispecific binding molecule comprises, e.g., in the second polypeptide chain, one or more of (e.g., both of) a second CH2 and a second CH3, e.g., in order from N-terminal to C-terminal. In some embodiments, the multispecific binding molecule comprises a heterodimeric antibody molecule, such as for instance, wherein the first and second Fc regions comprise knob-into-hole mutations. In some embodiments, the first Fc region binds the second Fc region more strongly than the first Fc region binds another copy of the first Fc region. In some embodiments, a first polypeptide of the multispecific binding molecule comprises the following sequences, from N-terminal to C-terminal: VH of the first binding domain, a first CH1, a first CH2, and a first CH3. In some embodiments, a second polypeptide of the multispecific binding molecule comprises the following sequences, from N-terminal to C-terminal: VH of the second binding domain, a first peptide linker (e.g., a (G4S) linker), VL of the second binding domain, a second CH2, and a second CH3. In some embodiments, a third polypeptide of the multispecific binding molecule comprises the following sequences: from N-terminal to C-terminal: VL of the first binding domain and CL. In some embodiments, the second polypeptide of the multispecific binding molecule further comprises a homomultimerization domain, e.g., a Matrilin1 protein or the coiled-coil domain of cartilage oligomeric matrix protein (COMPcc), C-terminal to the second CH3, e.g., via a peptide linker (e.g., a (G4S)4 linker, a (G4S) linker, or a (G4S)3 linker). In some embodiments, the multispecific binding molecule comprises two, three, four, or five copies of the first binding domain and the same number of copies of the second binding domain, e.g., as depicted in FIG. 50B. In some embodiments, the first binding domain comprises a costimulatory molecule binding domain, e.g., an anti-CD2 binding domain (for example, an anti-CD2 Fab). In some embodiments, the first binding domain comprises a costimulatory molecule binding domain, e.g., an anti-CD28 binding domain (for example, an anti-CD28 Fab). In some embodiments, the second binding domain comprises an anti-CD3 binding domain, e.g., an anti-CD3 scFv. Examples of such multispecific binding molecules are depicted as the leftmost construct in the bottom row of FIG. 50A; constructs in FIG. 50B, Construct 9, Construct 10, Construct 12, Construct 13, Construct 15, and Construct 16 in FIG. 51B; and Construct 9, Construct 10, Construct 12, Construct 13, Construct 15, and Construct 16 in Table 28.

[0565] In some embodiments, a binding molecule described herein comprises a binding domain. In some embodiments the binding domain (e.g., an scFv) is situated N terminal to an Fc region. In some embodiments, the binding molecule comprises a heterodimeric antibody molecule, such as for instance, wherein the first and second Fc regions comprise knob-into-hole mutations. In some embodiments, the first Fc region binds the second Fc region more strongly than the first Fc region binds another copy of the first Fc region. In some embodiments, the binding molecule comprises one or more of (e.g., all of) a CH2 and a CH3, e.g., in order from N-terminal to C-terminal. In some embodiments, a second polypeptide of the binding molecule comprises the following sequences, from N-terminal to C-terminal: VH of the binding domain, first peptide linker (e.g., a (G4S)4 linker), VL of the binding domain, second peptide linker (e.g., (G4S)4 linker or (G4S) linker), CH2, and CH3. In some embodiments, the second polypeptide of the binding molecule further comprises a homomultimerization domain, e.g., a Matrilin1 protein or the coiled-coil domain of cartilage oligomeric matrix protein (COMPcc), C-terminal to the second CH3, e.g., via a peptide linker (e.g., (G4S)4 linker, (GS4)3 linker, or (G4S) linker). In some embodiments, the binding molecule comprises two, three, four, or five copies of the binding, e.g., as depicted in FIG. 50B. In some embodiments, the binding domain comprises an anti-CD3 binding domain, e.g., an anti-CD3 scFv. In some embodiments, a costimulatory molecule binding domain is absent. Examples of such binding molecules are depicted as the rightmost construct in the bottom row of FIG. 50A; Construct 11, Construct 14, and Construct 17 in FIG. 51B; and Construct 11, Construct 14, and Construct 17 in Table 28.

[0566] It is understood that in many of the embodiments herein, a multispecific binding molecule comprises two or more polypeptide chains that are covalently linked to each other, e.g., via a disulfide bridge. However, in some embodiments, the two or more polypeptide chains of the multispecific binding molecule may be noncovalently bound to each other.

[0567] It is also understood that a Fab fragment may be present as part of a larger protein, for instance, a Fab fragment may be fused with CH2 and CH3 and thus be part of full length antibody.

[0568] The multispecific binding molecule comprising an agent that stimulates a CD3/TCR complex and an agent that stimulates a costimulatory molecule and/or growth factor receptor disclosed herein is contemplated for use in the manufacturing embodiments disclosed herein, e.g., traditional manufacture or activated rapid manufacture.

### Fc Variants

[0569] In some embodiments, a multispecific binding molecule described herein comprises an Fc region, e.g., as described herein. In some embodiments, the Fc region is a wild type Fc region, e.g., a wild type human Fc region. In some embodiments, the Fc region comprises a variant, e.g., an Fc region comprising an addition, substitution, or deletion of at least one amino acid residue in the Fc region which results in, e.g., reduced or ablated affinity for at least one Fc receptor.

[0570] In some embodiments, the Fc region of an antibody interacts with a number of receptors or ligands including Fc Receptors (e.g., FcyRI, FcyRIIA, FcyRIIIA), the complement protein CIq, and other molecules such as proteins A and G. These interactions promote a variety of effector functions and downstream signaling events including: antibody dependent cell-mediated cytotoxicity (ADCC), Antibody-dependent cellular phagocytosis (ADCP) and complement dependent cytotoxicity (CDC).

[0571] In some embodiments, a multispecific binding molecule described herein comprising a variant Fc region has reduced, e.g., ablated, affinity for an Fc receptor, e.g., an Fc receptor described herein. In some embodiments, the reduced affinity is compared to an otherwise similar antibody with a wild type Fc region.

[0572] In some embodiments, a multispecific binding molecule described herein comprising a variant Fc region has one or more of the following properties: (1) reduced effector function (e.g., reduced ADCC, ADCP and/or CDC); (2) reduced binding to one or more Fc receptors; and/or (3) reduced binding to C1q complement. In some embodiments, the reduction in any one, or all of properties (1)-(3) is compared to an otherwise similar antibody with a wildtype Fc region.

[0573] Exemplary Fc region variants are provided in Table 34 and also disclosed in Saunders O, (2019) Frontiers in Immunology; vol 10, article1296, the entire contents of which is hereby incorporated by reference.

[0574] In some embodiments, a multispecific binding molecule described herein comprises any one or all, or any combination of Fc region variants, e.g., mutations, disclosed in Table 34. In some embodiments, a multispecific binding molecule described herein comprises any one or all, or any combination of a mutant comprising a L234, e.g., L234A and or L235, e.g., L234A mutation (LALA) in the IgG1 Fc amino acid sequence; D265, e.g., D265A and/or P329, e.g., P329A (DAPA); N297, e.g., N297A; DANAPA (D265A, N297A, and P329A); and/or L234, e.g. L234A, L235, e.g., L235A, D265, e.g., D265A, N297, e.g., N297A, and P331, e.g., P331S (LALADANAPS).

TABLE 34

Exemplary Fc modifications

| | |
|---|---|
| Modification or mutation | Altered effector function |
| Leu235Glu | ADCC; |
| Leu234Ala/Leu235Ala (LALA) | ADCC; ADCP; CDC |
| Ser228Pro/Leu235Glu | |
| Leu234Ala/Leu235Ala/Pro329Gly | ADCP |
| Pro331Ser/Leu234Glu/Leu235Phe | CDC |
| Asp265Ala | ADCC, ADCP |
| Gly237Ala | ADCP |
| Glu318Ala | ADCP |
| Glu233Pro | |
| Gly236Arg/Leu328Arg | ADCC |
| His268Gln/Val309Leu/Ala330Ser/Pro331Ser | ADCC; ADCP; CDC |
| Val234Ala/Gly237Ala/Pro238Ser/ His268Ala/Val309Leu/Ala330Ser/Pro331Ser | ADCC; ADCP; CDC |
| Leu234Ala/L235Ala/Gly237Ala/P238Ser/ His268Ala/Ala330Ser/Pro331Ser | ADCC; CDC |
| Ala330Leu | CDC |
| Asp270Ala | CDC |
| Lys322Ala | CDC |
| Pro329Ala | CDC |
| Pro331Ala | CDC |
| Val264Ala | CDC |
| High mannose glycosylation | CDC |
| Phe241Ala | CDC |
| Asn297Ala or Gly or Gln | ADCC; ADCP; CDC |
| S228P/Phe234Ala/Leu235Ala | ADCC; CDC |

### Population of CAR-Expressing Cells Manufactured by the Processes Disclosed Herein

[0575] In some embodiments, the disclosure features an immune effector cell (for example, T cell or NK cell), for example, made by any of the manufacturing methods described herein, engineered to express a CAR, wherein the engineered immune effector cell exhibits an antitumor property. In some embodiments, the CAR comprises an antigen binding domain, a transmembrane domain, and an intracellular signaling domain. An exemplary antigen is a cancer associated antigen described herein. In some embodiments, the cell (for example, T cell or NK cell) is transformed with the CAR and the CAR is expressed on the cell surface. In some embodiments, the cell (for example, T cell or NK cell) is transduced with a viral vector encoding the CAR. In some embodiments, the viral vector is a retroviral vector. In some embodiments, the viral vector is a lentiviral vector. In some such embodiments, the cell may stably express the CAR. In some embodiments, the cell (for example, T cell or NK cell) is transfected with a nucleic acid, for example, mRNA, cDNA, or DNA, encoding a CAR. In some such embodiments, the cell may transiently express the CAR.

[0576] In some embodiments, provided herein is a population of cells (for example, immune effector cells, for example, T cells or NK cells) made by any of the manufacturing processes described herein (for example, the cytokine process, or the activation process described herein), engineered to express a CAR.

[0577] In some embodiments, the percentage of naive cells, for example, naive T cells, for example, CD45RA+ CD45RO- CCR7+ T cells, in the population of cells at the end of the manufacturing process (for example, at the end of the cytokine process or the activation process described herein) (1) is the same as, (2) differs, for example, by no more than 4, 5, 6, 7, 8, 9, 10, 11, 12, 13, 14, or 15%, from, or (3) is increased, for example, by at least 5, 6, 7, 8, 9, 10, 11, 12, 13, 14, 15, 16, 17, 18, 19, 20, 21, 22, 23, 24, or 25%, as compared to, the percentage of naive cells, for example, naive T cells, for example, CD45RA+ CD45RO- CCR7+ cells, in the population of cells at the beginning of the manufacturing process (for example, at the beginning of the cytokine process or the activation process described herein). In some embodiments, the population of cells at the end of the manufacturing process (for example, at the end of the cytokine process or the activation process described herein) shows a higher percentage of naive cells, for example, naive T cells, for example, CD45RA+ CD45RO- CCR7+ T cells (for example, at least 5, 6, 7, 8, 9, 10, 11, 12, 13, 14, 15, 16, 17, 18, 19, 20, 25, 30, 35, 40, 45, or 50% higher), compared with cells made by an otherwise similar method which lasts, for example, more than 26 hours (for example, which lasts more than 5, 6, 7, 8, 9, 10, 11, or 12 days) or which involves expanding the population of cells in vitro for, for example, more than 3 days (for example, expanding the population of cells in vitro for 3, 4, 5, 6, 7, 8, 9, 10, 11, 12, 13, 14, or 15 days).

[0578] In some embodiments, the percentage of naive cells, for example, naive T cells, for example, CD45RA+ CD45RO- CCR7+ T cells, in the population of cells at the end of the manufacturing process (for example, at the end of the cytokine process or the activation process described herein) is not less than 20, 25, 30, 35, 40, 45, 50, 55, or 60%.

[0579] In some embodiments, the percentage of central memory cells, for example, central memory T cells, for example, CD95+ central memory T cells, in the population of cells at the end of the manufacturing process (for example, at the end of the cytokine process or the activation process described herein) (1) is the same as, (2) differs, for example, by no more than 4, 5, 6, 7, 8, 9, 10, 11, 12, 13, 14, or 15% from, or (3) is decreased, for example, by at least 5, 6, 7, 8, 9, 10, 11, 12, 13, 14, 15, 16, 17, 18, 19, 20, 21, 22, 23, 24, or 25%, as compared to, the percentage of central memory cells, for example, central memory T cells, for example, CD95+ central memory T cells, in the population of cells at the beginning of the manufacturing process (for example, at the beginning of the cytokine process or the activation process described herein). In some embodiments, the population of cells at the end of the manufacturing process (for example, at the end of the cytokine process or the activation process described herein) shows a lower percentage of central memory cells, for example, central memory T cells, for example, CD95+ central memory T cells (for example, at least 5, 6, 7, 8, 9, 10, 11, 12, 13, 14, 15, 16, 17, 18, 19, 20, 25, 30, 35, 40, 45, or 50% lower), compared with cells made by an otherwise similar method which lasts, for example, more than 26 hours (for example, which lasts more than 5, 6, 7, 8, 9, 10, 11, or 12 days) or which involves expanding the population of cells in vitro for, for example, more than 3 days (for example, expanding the population of cells in vitro for 3, 4, 5, 6, 7, 8, 9, 10, 11, 12, 13, 14, or 15 days).

[0580] In some embodiments, the percentage of central memory cells, for example, central memory T cells, for example, CD95+ central memory T cells, in the population of cells at the end of the manufacturing process (for example, at the end of the cytokine process or the activation process described herein) is no more than 40, 45, 50, 55, 60, 65, 70, 75, or 80%.

[0581] In some embodiments, the population of cells at the end of the manufacturing process (for example, at the end of the cytokine process or the activation process described herein) after being administered in vivo, persists longer or expands at a higher level (for example, at least 20, 25, 30, 35, 40, 45, 50, 55, 60, 65, 70, 75, 80, 85, or 90% higher) (for example, as assessed using methods described in Example 1 with respect to FIG. 4C), compared with cells made by an otherwise similar method which lasts, for example, more than 26 hours (for example, which lasts more than 5, 6, 7, 8, 9, 10, 11, or 12 days) or which involves expanding the population of cells in vitro for, for example, more than 3 days (for example, expanding the population of cells in vitro for 3, 4, 5, 6, 7, 8, 9, 10, 11, 12, 13, 14, or 15 days).

[0582] In some embodiments, the population of cells has been enriched for IL6R-expressing cells (for example, cells that are positive for IL6Rα and/or IL6Rβ prior to the beginning of the manufacturing process (for example, prior to the beginning of the cytokine process or the activation process described herein). In some embodiments, the population of cells comprises, for example, no less than 30, 35, 40, 45, 50, 55, 60, 65, 70, 75, or 80% of IL6R-expressing cells (for example, cells that are positive for IL6Rα and/or IL6Rβ at the beginning of the manufacturing process (for example, at the beginning of the cytokine process or the activation process described herein).

### Pharmaceutical Composition

[0583] Furthermore, the present disclosure provides CAR-expressing cell compositions and their use in medicaments or methods for treating, among other diseases, cancer or any malignancy or autoimmune diseases involving cells or tissues which express a tumor antigen as described herein. In some embodiments, provided herein are pharmaceutical compositions comprising a CAR-expressing cell, for example, a plurality of CAR-expressing cells, made by a manufacturing process described herein (for example, the cytokine process, or the activation process described herein), in combination with one or more pharmaceutically or physiologically acceptable carriers, diluents or excipients.

### Chimeric Antigen Receptor (CAR)

[0584] The present invention provides immune effector cells (for example, T cells or NK cells) that are engineered to contain one or more CARs that direct the immune effector cells to cancer. This is achieved through an antigen binding domain on the CAR that is specific for a cancer associated antigen. There are two classes of cancer associated antigens (tumor antigens) that can be targeted by the CARs described herein: (1) cancer associated antigens that are expressed on the surface of cancer cells; and (2) cancer associated antigens that themselves are intracellular, however, fragments (peptides) of such antigens are presented on the surface of the cancer cells by MHC (major histocompatibility complex).

[0585] Accordingly, an immune effector cell, for example, obtained by a method described herein, can be engineered to contain a CAR that targets one of the following cancer associated antigens (tumor antigens): CD19, CD123, CD22, CD30, CD171, CS-1, CLL-1, CD33, EGFRvIII, GD2, GD3, BCMA, Tn Ag, PSMA, ROR1, FLT3, FAP, TAG72, CD38, CD44v6, CEA, EPCAM, B7H3, KIT, IL-13Ra2, Mesothelin, IL-11Ra, PSCA, VEGFR2, LewisY, CD24, PDGFR-beta, PRSS21, SSEA-4, CD20, Folate receptor alpha, ERBB2 (Her2/neu), MUC1, EGFR, NCAM, Prostase, PAP, ELF2M, Ephrin B2, IGF-I receptor, CAIX, LMP2, gp100, bcr-abl, tyrosinase, EphA2, Fucosyl GM1, sLe, GM3, TGS5, HMWMAA, o-acetyl-GD2, Folate receptor beta, TEM1/CD248, TEM7R, CLDN6, TSHR, GPRC5D, CXORF61, CD97, CD179a, ALK, Plysialic acid, PLAC1, GloboH, NY-BR-1, UPK2, HAVCR1, ADRB3, PANX3, GPR20, LY6K, OR51E2, TARP, WT1, NY-ESO-1, LAGE-1a, legumain, HPV E6,E7, MAGE-A1, MAGE A1, ETV6-AML, sperm protein 17, XAGE1, Tie 2, MAD-CT-1, MAD-CT-2, Fos-related antigen 1, p53, p53 mutant, prostein, survivin and telomerase, PCTA-1/Galectin 8, MelanA/MART1, Ras mutant, hTERT, sarcoma translocation breakpoints, ML-IAP, ERG (TMPRSS2 ETS fusion gene), NA17, PAX3, Androgen receptor, Cyclin B1, MYCN, RhoC, TRP-2, CYP1B1, BORIS, SART3, PAX5, OY-TES1, LCK, AKAP-4, SSX2, RAGE-1, human telomerase reverse transcriptase, RU1, RU2, intestinal carboxyl esterase, and mut hsp70-2.

[0586] Sequences of non-limiting examples of various components that can be part of a CAR molecule described herein are listed in Table 1, where “aa” stands for amino acids, and “na” stands for nucleic acids that encode the corresponding peptide.

TABLE 1

Sequences of various components of CAR

| | | |
|---|---|---|
| SEQ ID NO | Description | Sequence |
| SEQ ID NO: 11 | EF-1α promoter (na) | CGTGAGGCTCCGGTGCCCGTCAGTGGGCAGAGCGCACATCGCCCACAGTCCCCGAGAAGTTGGGGGGAGGGGTCGGCAATTGAACCGGTGCCTAGAGAAGGTGGCGCGGGGTAAACTGGGAAAGTGATGTCGTGTACTGGCTCCGCCTTTTTCCCGAGGGTGGGGGAGAACCGTATATAAGTGCAGTAGTCGCCGTGAACGTTCTTTTTCGCAACGGGTTTGCCGCCAGAACACAGGTAAGTGCCGTGTGTGGTTCCCGCGGGCCTGGCCTCTTTACGGGTTATGGCCCTTGCGTGCCTTGAATTACTTCCACCTGGCTGCAGTACGTGATTCTTGATCCCGAGCTTCGGGTTGGAAGTGGGTGGGAGAGTTCGAGGCCTTGCGCTTAAGGAGCCCCTTCGCCTCGTGCTTGAGTTGAGGCCTGGCCTGGGCGCTGGGGCCGCCGCGTGCGAATCTGGTGGCACCTTCGCGCCTGTCTCGCTGCTTTCGATAAGTCTCTAGCCATTTAAAATTTTTGATGACCTGCTGCGACGCTTTTTTTCTGGCAAGATAGTCTTGTAAATGCGGGCCAAGATCTGCACACTGGTATTTCGGTTTTTGGGGCCGCGGGCGGCGACGGGGCCCGTGCGTCCCAGCGCACATGTTCGGCGAGGCGGGGCCTGCGAGCGCGGCCACCGAGAATCGGACGGGGGTAGTCTCAAGCTGGCCGGCCTGCTCTGGTGCCTGGCCTCGCGCCGCCGTGTATCGCCCCGCCCTGGGCGGCAAGGCTGGCCCGGTCGGCACCAGTTGCGTGAGCGGAAAGATGGCCGCTTCCCGGCCCTGCTGCAGGGAGCTCAAAATGGAGGACGCGGCGCTCGGGAGAGCGGGCGGGTGAGTCACCCACACAAAGGAAAAGGGCCTTTCCGTCCTCAGCCGTCGCTTCATGTGACTCCACGGAGTACCGGGCGCCGTCCAGGCACCTCGATTAGTTCTCGAGCTTTTGGAGTACGTCGTCTTTAGGTTGGGGGGAGGGGTTTTATGCGATGGAGTTTCCCCACACTGAGTGGGTGGAGACTGAAGTTAGGCCAGCTTGGCACTTGATGTAATTCTCCTTGGAATTTGCCCTTTTTGAGTTTGGATCTTGGTTCATTCTCAAGCCTCAGACAGTGGTTCAAAGTTTTTTTCTTCCATTTCAGGTGTCGTGA |
| SEQ ID NO: 1 | Leader (aa) | MALPVTALLLPLALLLHAARP |
| SEQ ID NO: 12 | Leader (na) | ATGGCCCTGCCTGTGACAGCCCTGCTGCTGCCTCTGGCTCTGCTGCTGCATGCCGCTAGACCC |
| SEQ ID NO: 199 | Leader (na) | ATGGCCCTCCCTGTCACCGCCCTGCTGCTTCCGCTGGCTCTTCTGCTCCACGCCGCTCGGCCC |
| SEQ ID NO: 2 | CD 8 hinge (aa) | TTTPAPRPPTPAPTIASQPLSLRPEACRPAAGGAVHTRGLDFACD |
| SEQ ID NO: 13 | CD8 hinge (na) | ACCACGACGCCAGCGCCGCGACCACCAACACCGGCGCCCACCATCGCGTCGCAGCCCCTGTCCCTGCGCCCAGAGGCGTGCCGGCCAGCGGCGGGGGGCGCAGTGCACACGAGGGGGCTGGACTTCGCCTGTGAT |
| SEQ ID NO: 3 | Ig4 hinge (aa) | ESKYGPPCPPCPAPEFLGGPSVFLFPPKPKDTLMISRTPEVTCVVVDVSQEDPEVQFNWYVDGVEVHNAKTKPREEQFNSTYRVVSVLTVLHQDWLNGKEYKCKVSNKGLPSSIEKTISKAKGQPREPQVYTLPPSQEEMTKNQVSLTCLVKGFYPSDIAVEWESNGQPENNYKTTPPVLDSDGSFFLYSRLTVDKSRWQEGNVFSCSVMHEALHNHYTQKSLSLSLGKM |
| SEQ ID NO: 14 | Ig4 hinge (na) | GAGAGCAAGTACGGCCCTCCCTGCCCCCCTTGCCCTGCCCCCGAGTTCCTGGGCGGACCCAGCGTGTTCCTGTTCCCCCCCAAGCCCAAGGACACCCTGATGATCAGCCGGACCCCCGAGGTGACCTGTGTGGTGGTGGACGTGTCCCAGGAGGACCCCGAGGTCCAGTTCAACTGGTACGTGGACGGCGTGGAGGTGCACAACGCCAAGACCAAGCCCCGGGAGGAGCAGTTCAATAGCACCTACCGGGTGGTGTCCGTGCTGACCGTGCTGCACCAGGACTGGCTGAACGGCAAGGAATACAAGTGTAAGGTGTCCAACAAGGGCCTGCCCAGCAGCATCGAGAAAACCATCAGCAAGGCCAAGGGCCAGCCTCGGGAGCCCCAGGTGTACACCCTGCCCCCTAGCCAAGAGGAGATGACCAAGAACCAGGTGTCCCTGACCTGCCTGGTGAAGGGCTTCTACCCCAGCGACATCGCCGTGGAGTGGGAGAGCAACGGCCAGCCCGAGAACAACTACAAGACCACCCCCCCTGTGCTGGACAGCGACGGCAGCTTCTTCCTGTACAGCCGGCTGACCGTGGACAAGAGCCGGTGGCAGGAGGGCAACGTCTTTAGCTGCTCCGTGATGCACGAGGCCCTGCACAACCACTACACCCAGAAGAGCCTGAGCCTGTCCCTGGGCAAGATG |
| SEQ ID NO: 4 | IgD hinge (aa) | RWPESPKAQASSVPTAQPQAEGSLAKATTAPATTRNTGRGGEEKKKEKEKEEQEERETKTPECPSHTQPLGVYLLTPAVQDLWLRDKATFTCFVVGSDLKDAHLTWEVAGKVPTGGVEEGLLERHSNGSQSQHSRLTLPRSLWNAGTSVTCTLNHPSLPPQRLMALREPAAQAPVKLSLNLLASSDPPEAASWLLCEVSGFSPPNILLMWLEDQREVNTSGFAPARPPPQPGSTTFWAWSVLRVPAPPSPQPATYTCVVSHEDSRTLLNASRSLEVSYVTDH |
| SEQ ID NO: 15 | IgD hinge (na) | AGGTGGCCCGAAAGTCCCAAGGCCCAGGCATCTAGTGTTCCTACTGCACAGCCCCAGGCAGAAGGCAGCCTAGCCAAAGCTACTACTGCACCTGCCACTACGCGCAATACTGGCCGTGGCGGGGAGGAGAAGAAAAAGGAGAAAGAGAAAGAAGAACAGGAAGAGAGGGAGACCAAGACCCCTGAATGTCCATCCCATACCCAGCCGCTGGGCGTCTATCTCTTGACTCCCGCAGTACAGGACTTGTGGCTTAGAGATAAGGCCACCTTTACATGTTTCGTCGTGGGCTCTGACCTGAAGGATGCCCATTTGACTTGGGAGGTTGCCGGAAAGGTACCCACAGGGGGGGTTGAGGAAGGGTTGCTGGAGCGCCATTCCAATGGCTCTCAGAGCCAGCACTCAAGACTCACCCTTCCGAGATCCCTGTGGAACGCCGGGACCTCTGTCACATGTACTCTAAATCATCCTAGCCTGCCCCCACAGCGTCTGATGGCCCTTAGAGAGCCAGCCGCCCAGGCACCAGTTAAGCTTAGCCTGAATCTGCTCGCCAGTAGTGATCCCCCAGAGGCCGCCAGCTGGCTCTTATGCGAAGTGTCCGGCTTTAGCCCGCCCAACATCTTGCTCATGTGGCTGGAGGACCAGCGAGAAGTGAACACCAGCGGCTTCGCTCCAGCCCGGCCCCCACCCCAGCCGGGTTCTACCACATTCTGGGCCTGGAGTGTCTTAAGGGTCCCAGCACCACCTAGCCCCCAGCCAGCCACATACACCTGTGTTGTGTCCCATGAAGATAGCAGGACCCTGCTAAATGCTTCTAGGAGTCTGGAGGTTTCCTACGTGACTGACCATT |
| SEQ ID NO: 6 | CD8 Transmembrane (aa) | IYIWAPLAGTCGVLLLSLVITLYC |
| SEQ ID NO: 17 | CD8 Transmembrane (na) | ATCTACATCTGGGCGCCCTTGGCCGGGACTTGTGGGGTCCTTCTCCTGTCACTGGTTATCACCCTTTACTGC |
| SEQ ID NO: 7 | 4-1BB intracellular domain (aa) | KRGRKKLLYIFKQPFMRPVQTTQEEDGCSCRFPEEEEGGCEL |
| SEQ ID NO: 18 | 4-1BB intracellular domain (na) | AAACGGGGCAGAAAGAAACTCCTGTATATATTCAAACAACCATTTATGAGACCAGTACAAACTACTCAAGAGGAAGATGGCTGTAGCTGCCGATTTCCAGAAGAAGAAGAAGGAGGATGTGAACTG |
| SEQ ID NO: 8 | CD27 (aa) | QRRKYRSNKGESPVEPAEPCRYSCPREEEGSTIPIQEDYRKPEPACSP |
| SEQ ID NO: 19 | CD27 (na) | AGGAGTAAGAGGAGCAGGCTCCTGCACAGTGACTACATGAACATGACTCCCCGCCGCCCCGGGCCCACCCGCAAGCATTACCAGCCCTATGCCCCACCACGCGACTTCGCAGCCTATCGCTCC |
| SEQ ID NO: 9 | CD3-zeta (aa) (Q/K mutant) | RVKFSRSADAPAYKQGQNQLYNELNLGRREEYDVLDKRRGRDPEMGGKPRRKNPQEGLYNELQKDKMAEAYSEIGMKGERRRGKGHDGLYQGLSTATKDTYDALHMQALPPR |
| SEQ ID NO: 20 | CD3-zeta (na) (Q/K mutant) | AGAGTGAAGTTCAGCAGGAGCGCAGACGCCCCCGCGTACAAGCAGGGCCAGAACCAGCTCTATAACGAGCTCAATCTAGGACGAAGAGAGGAGTACGATGTTTTGGACAAGAGACGTGGCCGGGACCCTGAGATGGGGGGAAAGCCGAGAAGGAAGAACCCTCAGGAAGGCCTGTACAATGAACTGCAGAAAGATAAGATGGCGGAGGCCTACAGTGAGATTGGGATGAAAGGCGAGCGCCGGAGGGGCAAGGGGCACGATGGCCTTTACCAGGGTCTCAGTACAGCCACCAAGGACACCTACGACGCCCTTCACATGCAGGCCCTGCCCCCTCGC |
| SEQ ID NO: 10 | CD3-zeta (aa) (NCBI Reference Sequence NM_000734.3) | RVKFSRSADAPAYQQGQNQLYNELNLGRREEYDVLDKRRGRDPEMGGKPRRKNPQEGLYNELQKDKMAEAYSEIGMKGERRRGKGHDGLYQGLSTATKDTYDALHMQALPPR |
| SEQ ID NO: 21 | CD3-zeta (na) (NCBI Reference Sequence NM₋000734.3) | AGAGTGAAGTTCAGCAGGAGCGCAGACGCCCCCGCGTACCAGCAGGGCCAGAACCAGCTCTATAACGAGCTCAATCTAGGACGAAGAGAGGAGTACGATGTTTTGGACAAGAGACGTGGCCGGGACCCTGAGATGGGGGGAAAGCCGAGAAGGAAGAACCCTCAGGAAGGCCTGTACAATGAACTGCAGAAAGATAAGATGGCGGAGGCCTACAGTGAGATTGGGATGAAAGGCGAGCGCCGGAGGGGCAAGGGGCACGATGGCCTTTACCAGGGTCTCAGTACAGCCACCAAGGACACCTACGACGCCCTTCACATGCAGGCCCTGCCCCCTCGC |
| SEQ ID NO: 36 | CD28 Intracellular domain (amino acid sequence) | RSKRSRLLHSDYMNMTPRRPGPTRKHYQPYAPPRDFAAYRS |
| SEQ ID NO: 37 | CD28 Intracellular domain (nucleotide sequence) | AGGAGTAAGAGGAGCAGGCTCCTGCACAGTGACTACATGAACATGACTCCCCGCCGCCCCGGGCCCACCCGCAAGCATTACCAGCCCTATGCCCCACCACGCGACTTCGCAGCCTATCGCTCC |
| SEQ ID NO: 38 | ICOS Intracellular domain (amino acid sequence) | TKKKYSSSVHDPNGEYMFMRAVNTAKKSRLTDVTL |
| SEQ ID NO: 39 | ICOS Intracellular domain (nucleotide sequence) | ACAAAAAAGAAGTATTCATCCAGTGTGCACGACCCTAACGGTGAATACATGTTCATGAGAGCAGTGAACACAGCCAAAAAATCCAGACTCACAGATGTGACCCTA |
| SEQ ID NO: 5 | GS hinge/linker (aa) | GGGGSGGGGS |
| SEQ ID NO: 16 | GS hinge/linker (na) | GGTGGCGGAGGTTCTGGAGGTGGAGGTTCC |
| SEQ ID NO: 40 | GS hinge/linker (na) | GGTGGCGGAGGTTCTGGAGGTGGGGGTTCC |
| SEQ ID NO: 25 | linker | GGGGS |
| SEQ ID NO: 26 | linker | (Gly-Gly-Gly-Gly-Ser)n, where n = 1-6, for example, GGGGSGGGGS GGGGSGGGGS GGGGSGGGGS |
| SEQ ID NO: 27 | linker | GGGGSGGGGSGGGGSGGGGS |
| SEQ ID NO: 28 | linker | GGGGSGGGGSGGGGS |
| SEQ ID NO: 29 | linker | GGGS |
| SEQ ID NO: 41 | linker | (Gly-Gly-Gly-Ser)n where n is a positive integer equal to or greater than 1 |
| SEQ ID NO: 42 | linker | (Gly-Gly-Gly-Ser)n, where n = 1-10, for example, GGGSGGGSGG GSGGGSGGGS GGGSGGGSGG GSGGGSGGGS |
| SEQ ID NO: 43 | linker | GSTSGSGKPGSGEGSTKG |
| SEQ ID NO: 30 | poly(A) | (A)₅₀₀₀ This sequence may encompass 50-5000 adenines. |
| SEQ ID NO: 31 | polyT | (T)₁₀₀ |
| SEQ ID NO: 32 | polyT | (T)₅₀₀₀ This sequence may encompass 50-5000 thymines. |
| SEQ ID NO: 33 | poly(A) | (A)₅₀₀₀ This sequence may encompass 100-5000 adenines. |
| SEQ ID NO: 34 | poly(A) | (A)₄₀₀ This sequence may encompass 100-400 adenines. |
| SEQ ID NO: 35 | poly(A) | (A)₂₀₀₀ This sequence may encompass 50-2000 adenines. |
| SEQ ID NO: 22 | PD1 CAR (aa) | pgwfldspdrpwnpptfspallvvtegdnatftcsfsntsesfvlnwvrmspsnqtdklaafpedrsqpgqdcrfrvtqlpngrdfhmsvvrarrndsgtylcgaislapkaqikeslraelrvterraevptahpspsprpagqfqtlvtttpaprpptpaptiasqplslrpeacrpaaggavhtrgldfacdiyiwaplagtcgvlllslvitlyckrgrkkllyifkqpfmrpvqttqeedgcscrfpeeeeggcelrvkfsrsadapaykqgqnqlynelnlgrreeydvldkrrgrdpemggkprrknpqeglynelqkdkmaeayseigmkgerrrgkghdglyqglstatkdtydalhmqalppr |
| SEQ ID NO: 23 | PD-1 CAR (na) (PD1 ECD underlined) | atggccctccctgtcactgccctgcttctccccctcgcactcctgctccacgccgctagaccacccggatggtttctggactctccggatcgcccgtggaatcccccaaccttctcaccggcactcttggttgtgactgagggcgataatgcgaccttcacgtgctcgttctccaacacctccgaatcattcgtgctgaactggtaccgcatgagcccgtcaaaccagaccgacaagctcgccgcgtttccggaagatcggtcgcaaccgggacaggattgtcggttccgcgtgactcaactgccgaatggcagagacttccacatgagcgtggtccgcgctaggcgaaacgactccgggacctacctgtgcggagccatctcgctggcgcctaaggcccaaatcaaagagagcttgagggccgaactgagagtgaccgagcgcagagctgaggtgccaactgcacatccatccccatcgcctcggcctgcggggcagtttcagaccctggtcacgaccactccggcgccgcgcccaccgactccggccccaactatcgcgagccagcccctgtcgctgaggccggaagcatgccgccctgccgccggaggtgctgtgcatacccggggattggacttcgcatgcgacatctacatttgggctcctctcgccggaacttgtggcgtgctccttctgtccctggtcatcaccctgtactgcaagcggggtcggaaaaagcttctgtacattttcaagcagcccttcatgaggcccgtgcaaaccacccaggaggaggacggttgctcctgccggttccccgaagaggaagaaggaggttgcgagctgcgcgtgaagttctcccggagcgccgacgcccccgcctataagcagggccagaaccagctgtacaacgaactgaacctgggacggcgggaagagtacgatgtgctggacaagcggcgcggccgggaccccgaaatgggcgggaagcctagaagaaagaaccctcaggaaggcctgtataacgagctgcagaaggacaagatggccgaggcctactccgaaattgggatgaagggagagcggcggaggggaaaggggcacgacggcctgtaccaaggactgtccaccgccaccaaggacacatacgatgccctgcacatgcaggcccttccccctcgc |
| SEQ ID NO: 24 | PD-1 CAR (aa) with signal (PD1 ECD underlined) | Malpvtalllplalllhaarppswfldspdrpwnpptfspallvvtesdnatftcsfsntsesfvlnwvrmspsnqtdklaafpedrsqpgqdcrfrvtqlpngrdfhmsvvrarrndsgtylcgaislapkaqikeslraelrvterraevptahpspsprpagqfqtlvtttpaprpptpaptiasqplslrpeacrpaaggavhtrgldfacdiyiwaplagtcgvlllslvitlyckrgrkkllyifkqpfmrpvqttqeedgcscrfpeeeeggcelrvkfsrsadapaykqgqnqlynelnlgrreeydvldkrrgrdpemggkprrknpqeglynelqkdkmaeayseigmkgerrrgkghdglyqglstatkdtydalhmqalppr |

### Bispecific CARs

[0587] In some embodiments a multispecific antibody molecule is a bispecific antibody molecule. A bispecific antibody has specificity for no more than two antigens. A bispecific antibody molecule is characterized by a first immunoglobulin variable domain sequence which has binding specificity for a first epitope and a second immunoglobulin variable domain sequence that has binding specificity for a second epitope. In some embodiments the first and second epitopes are on the same antigen, for example, the same protein (or subunit of a multimeric protein). In some embodiments the first and second epitopes overlap. In some embodiments the first and second epitopes do not overlap. In some embodiments the first and second epitopes are on different antigens, for example, different proteins (or different subunits of a multimeric protein). In some embodiments a bispecific antibody molecule comprises a heavy chain variable domain sequence and a light chain variable domain sequence which have binding specificity for a first epitope and a heavy chain variable domain sequence and a light chain variable domain sequence which have binding specificity for a second epitope. In some embodiments a bispecific antibody molecule comprises a half antibody having binding specificity for a first epitope and a half antibody having binding specificity for a second epitope. In some embodiments a bispecific antibody molecule comprises a half antibody, or fragment thereof, having binding specificity for a first epitope and a half antibody, or fragment thereof, having binding specificity for a second epitope. In some embodiments a bispecific antibody molecule comprises a scFv, or fragment thereof, have binding specificity for a first epitope and a scFv, or fragment thereof, have binding specificity for a second epitope.

[0588] In certain embodiments, the antibody molecule is a multi-specific (for example, a bispecific or a trispecific) antibody molecule. Protocols for generating bispecific or heterodimeric antibody molecules, and various configurations for bispecific antibody molecules, are described in, for example, paragraphs 455-458 of WO2015/142675, filed Mar. 13, 2015, which is incorporated by reference in its entirety.

[0589] In some embodiments, the bispecific antibody molecule is characterized by a first immunoglobulin variable domain sequence, for example, a scFv, which has binding specificity for CD19, for example, comprises a scFv as described herein, or comprises the light chain CDRs and/or heavy chain CDRs from a scFv described herein, and a second immunoglobulin variable domain sequence that has binding specificity for a second epitope on a different antigen.

### Chimeric TCR

[0590] In some embodiments, the antibodies and antibody fragments of the present invention (for example, CD19 antibodies and fragments) can be grafted to one or more constant domain of a T cell receptor (“TCR”) chain, for example, a TCR alpha or TCR beta chain, to create a chimeric TCR. Without being bound by theory, it is believed that chimeric TCRs will signal through the TCR complex upon antigen binding. For example, an scFv as disclosed herein, can be grafted to the constant domain, for example, at least a portion of the extracellular constant domain, the transmembrane domain and the cytoplasmic domain, of a TCR chain, for example, the TCR alpha chain and/or the TCR beta chain. As another example, an antibody fragment, for example a VL domain as described herein, can be grafted to the constant domain of a TCR alpha chain, and an antibody fragment, for example a VH domain as described herein, can be grafted to the constant domain of a TCR beta chain (or alternatively, a VL domain may be grafted to the constant domain of the TCR beta chain and a VH domain may be grafted to a TCR alpha chain). As another example, the CDRs of an antibody or antibody fragment may be grafted into a TCR alpha and/or beta chain to create a chimeric TCR. For example, the LCDRs disclosed herein may be grafted into the variable domain of a TCR alpha chain and the HCDRs disclosed herein may be grafted to the variable domain of a TCR beta chain, or vice versa. Such chimeric TCRs may be produced, for example, by methods known in the art (For example, Willemsen RA et al, Gene Therapy 2000; 7: 1369-1377; Zhang T et al, Cancer Gene Ther 2004; 11: 487-496; Aggen et al, Gene Ther. 2012 Apr;19(4):365-74).

### Non-Antibody Scaffolds

[0591] In embodiments, the antigen binding domain comprises a non-antibody scaffold, for example, a fibronectin, ankyrin, domain antibody, lipocalin, small modular immuno-pharmaceutical, maxybody, Protein A, or affilin. The non-antibody scaffold has the ability to bind to target antigen on a cell. In embodiments, the antigen binding domain is a polypeptide or fragment thereof of a naturally occurring protein expressed on a cell. In some embodiments, the antigen binding domain comprises a non-antibody scaffold. A wide variety of non-antibody scaffolds can be employed so long as the resulting polypeptide includes at least one binding region which specifically binds to the target antigen on a target cell.

[0592] Non-antibody scaffolds include: fibronectin (Novartis, MA), ankyrin (Molecular Partners AG, Zurich, Switzerland), domain antibodies (Domantis, Ltd., Cambridge, MA, and Ablynx nv, Zwijnaarde, Belgium), lipocalin (Pieris Proteolab AG, Freising, Germany), small modular immuno-pharmaceuticals (Trubion Pharmaceuticals Inc., Seattle, WA), maxybodies (Avidia, Inc., Mountain View, CA), Protein A (Affibody AG, Sweden), and affilin (gamma-crystallin or ubiquitin) (Scil Proteins GmbH, Halle, Germany).

[0593] In some embodiments the antigen binding domain comprises the extracellular domain, or a counter-ligand binding fragment thereof, of molecule that binds a counterligand on the surface of a target cell.

[0594] The immune effector cells can comprise a recombinant DNA construct comprising sequences encoding a CAR, wherein the CAR comprises an antigen binding domain (for example, antibody or antibody fragment, TCR or TCR fragment) that binds specifically to a tumor antigen, for example, a tumor antigen described herein, and an intracellular signaling domain. The intracellular signaling domain can comprise a costimulatory signaling domain and/or a primary signaling domain, for example, a zeta chain. As described elsewhere, the methods described herein can include transducing a cell, for example, from the population of T regulatory-depleted cells, with a nucleic acid encoding a CAR, for example, a CAR described herein.

[0595] In some embodiments, a CAR comprises a scFv domain, wherein the scFv may be preceded by an optional leader sequence such as provided in SEQ ID NO: 1, and followed by an optional hinge sequence such as provided in SEQ ID NO:2 or SEQ ID NO:36 or SEQ ID NO:38, a transmembrane region such as provided in SEQ ID NO:6, an intracellular signaling domain that includes SEQ ID NO:7 or SEQ ID NO:16 and a CD3 zeta sequence that includes SEQ ID NO:9 or SEQ ID NO:10, for example, wherein the domains are contiguous with and in the same reading frame to form a single fusion protein.

[0596] In some embodiments, an exemplary CAR constructs comprise an optional leader sequence (for example, a leader sequence described herein), an extracellular antigen binding domain (for example, an antigen binding domain described herein), a hinge (for example, a hinge region described herein), a transmembrane domain (for example, a transmembrane domain described herein), and an intracellular stimulatory domain (for example, an intracellular stimulatory domain described herein). In some embodiments, an exemplary CAR construct comprises an optional leader sequence (for example, a leader sequence described herein), an extracellular antigen binding domain (for example, an antigen binding domain described herein), a hinge (for example, a hinge region described herein), a transmembrane domain (for example, a transmembrane domain described herein), an intracellular costimulatory signaling domain (for example, a costimulatory signaling domain described herein) and/or an intracellular primary signaling domain (for example, a primary signaling domain described herein).

[0597] An exemplary leader sequence is provided as SEQ ID NO: 1. An exemplary hinge/spacer sequence is provided as SEQ ID NO: 2 or SEQ ID NO:36 or SEQ ID NO:38. An exemplary transmembrane domain sequence is provided as SEQ ID NO:6. An exemplary sequence of the intracellular signaling domain of the 4-1BB protein is provided as SEQ ID NO: 7. An exemplary sequence of the intracellular signaling domain of CD27 is provided as SEQ ID NO:16. An exemplary CD3zeta domain sequence is provided as SEQ ID NO: 9 or SEQ ID NO: 10.

[0598] In some embodiments, the immune effector cell comprises a recombinant nucleic acid construct comprising a nucleic acid molecule encoding a CAR, wherein the nucleic acid molecule comprises a nucleic acid sequence encoding an antigen binding domain, wherein the sequence is contiguous with and in the same reading frame as the nucleic acid sequence encoding an intracellular signaling domain. An exemplary intracellular signaling domain that can be used in the CAR includes, but is not limited to, one or more intracellular signaling domains of, for example, CD3-zeta, CD28, CD27, 4-1BB, and the like. In some instances, the CAR can comprise any combination of CD3-zeta, CD28, 4-1BB, and the like.

[0599] The nucleic acid sequences coding for the desired molecules can be obtained using recombinant methods known in the art, such as, for example by screening libraries from cells expressing the nucleic acid molecule, by deriving the nucleic acid molecule from a vector known to include the same, or by isolating directly from cells and tissues containing the same, using standard techniques. Alternatively, the nucleic acid of interest can be produced synthetically, rather than cloned.

[0600] Nucleic acids encoding a CAR can be introduced into the immune effector cells using, for example, a retroviral or lentiviral vector construct.

[0601] Nucleic acids encoding a CAR can also be introduced into the immune effector cell using, for example, an RNA construct that can be directly transfected into a cell. A method for generating mRNA for use in transfection involves in vitro transcription (IVT) of a template with specially designed primers, followed by poly(A) addition, to produce a construct containing 3′ and 5′ untranslated sequence (“UTR”) (for example, a 3′ and/or 5′ UTR described herein), a 5′ cap (for example, a 5′ cap described herein) and/or Internal Ribosome Entry Site (IRES) (for example, an IRES described herein), the nucleic acid to be expressed, and a poly(A) tail, typically 50-2000 bases in length (for example, described in the Examples, for example, SEQ ID NO:35). RNA so produced can efficiently transfect different kinds of cells. In some embodiments, the template includes sequences for the CAR. In some embodiments, an RNA CAR vector is transduced into a cell, for example, a T cell by electroporation.

### Antigen Binding Domain

[0602] In some embodiments, a plurality of the immune effector cells, for example, the population of T regulatory-depleted cells, include a nucleic acid encoding a CAR that comprises a target-specific binding element otherwise referred to as an antigen binding domain. The choice of binding element depends upon the type and number of ligands that define the surface of a target cell. For example, the antigen binding domain may be chosen to recognize a ligand that acts as a cell surface marker on target cells associated with a particular disease state. Thus, examples of cell surface markers that may act as ligands for the antigen binding domain in a CAR described herein include those associated with viral, bacterial and parasitic infections, autoimmune disease and cancer cells.

[0603] In some embodiments, the portion of the CAR comprising the antigen binding domain comprises an antigen binding domain that targets a tumor antigen, for example, a tumor antigen described herein.

[0604] The antigen binding domain can be any domain that binds to the antigen including but not limited to a monoclonal antibody, a polyclonal antibody, a recombinant antibody, a human antibody, a humanized antibody, and a functional fragment thereof, including but not limited to a single-domain antibody such as a heavy chain variable domain (VH), a light chain variable domain (VL) and a variable domain (VHH) of camelid derived nanobody, and to an alternative scaffold known in the art to function as antigen binding domain, such as a recombinant fibronectin domain, a T cell receptor (TCR), or a fragment there of, for example, single chain TCR, and the like. In some instances, it is beneficial for the antigen binding domain to be derived from the same species in which the CAR will ultimately be used in. For example, for use in humans, it may be beneficial for the antigen binding domain of the CAR to comprise human or humanized residues for the antigen binding domain of an antibody or antibody fragment.

### CD19 Car

[0605] In some embodiments, the CAR-expressing cell described herein is a CD19 CAR-expressing cell (for example, a cell expressing a CAR that binds to human CD19).

[0606] In some embodiments, the antigen binding domain of the CD19 CAR has the same or a similar binding specificity as the FMC63 scFv fragment described in Nicholson et al. Mol. Immun. 34 (16-17): 1157-1165 (1997). In some embodiments, the antigen binding domain of the CD19 CAR includes the scFv fragment described in Nicholson et al. Mol. Immun. 34 (16-17): 1157-1165 (1997).

[0607] In some embodiments, the CD19 CAR includes an antigen binding domain (for example, a humanized antigen binding domain) according to Table 3 of WO2014/153270, incorporated herein by reference. WO2014/153270 also describes methods of assaying the binding and efficacy of various CAR constructs.

[0608] In some embodiments, the parental murine scFv sequence is the CAR19 construct provided in PCT publication WO2012/079000 (incorporated herein by reference). In some embodiments, the anti-CD19 binding domain is a scFv described in WO2012/079000.

[0609] In some embodiments, the CAR molecule comprises the fusion polypeptide sequence provided as SEQ ID NO: 12 in PCT publication WO2012/079000, which provides an scFv fragment of murine origin that specifically binds to human CD19.

[0610] In some embodiments, the CD19 CAR comprises an amino acid sequence provided as SEQ ID NO: 12 in PCT publication WO2012/079000.

[0611] In some embodiments, the amino acid sequence is:

Diqmtqttsslsaslgdrvtiscrasqdiskylnwyqqkpdgtvklliyh
tsrlhsgvpsrfsgsgsgtdysltisnleqediatyfcqqgntlpytfgg
gtkleitggggsggggsggggsevklqesgpglvapsqslsvtctvsgvs
lpdygvswirqpprkglewlgviwgsettyynsalksrltiikdnsksqv
flkmnslqtddtaiyycakhyyyggsyamdywgqgtsvtvsstttpaprp
ptpaptiasqplslrpeacrpaaggavhtrgldfacdiyiwaplagtcgv
lllslvitlyckrgrkkllyifkqpfmrpvqttqeedgcscrfpeeeegg
celrvkfsrsadapaykqgqnqlynelnlgrreeydvldkrrgrdpemgg
kprrknpqeglynelqkdkmaeayseigmkgerrrgkghdglyqglstat
kdtydalhmqalppr (SEQ ID NO: 292)

, or a sequence substantially homologous thereto.

[0612] In some embodiments, the CD19 CAR has the USAN designation TISAGENLECLEUCEL-T. In embodiments, CTL019 is made by a gene modification of T cells is mediated by stable insertion via transduction with a self-inactivating, replication deficient Lentiviral (LV) vector containing the CTL019 transgene under the control of the EF-1 alpha promoter. CTL019 can be a mixture of transgene positive and negative T cells that are delivered to the subject on the basis of percent transgene positive T cells.

[0613] In other embodiments, the CD19 CAR comprises an antigen binding domain (for example, a humanized antigen binding domain) according to Table 3 of WO2014/153270, incorporated herein by reference.

[0614] Humanization of murine CD19 antibody is desired for the clinical setting, where the mouse-specific residues may induce a human-anti-mouse antigen (HAMA) response in patients who receive CART19 treatment, i.e., treatment with T cells transduced with the CAR19 construct. The production, characterization, and efficacy of humanized CD 19 CAR sequences is described in International Application WO2014/153270 which is herein incorporated by reference in its entirety, including Examples 1-5 (p. 115-159).

[0615] In some embodiments, the CAR molecule is a humanized CD19 CAR comprising the amino acid sequence of:

EIVMTQSPATLSLSPGERATLSCRASQDISKYLNWYQQKPGQAPRLLIYH
TSRLHSGIPARFSGSGSGTDYTLTISSLQPEDFAVYFCQQGNTLPYTFGQ
GTKLEIKGGGGSGGGGSGGGGSQVQLQESGPGLVKPSETLSLTCTVSGVS
LPDYGVSWIRQPPGKGLEWIGVIWGSETTYYQSSLKSRVTISKDNSKNQV
SLKLSSVTAADTAVYYCAKHYYYGGSYAMDYWGQGTLVTVSS (SEQ ID
NO: 293)

[0616] In some embodiments, the CAR molecule is a humanized CD19 CAR comprising the amino acid sequence of:

EIVMTQSPATLSLSPGERATLSCRASQDISKYLNWYQQKPGQAPRLLIYH
TSRLHSGIPARFSGSGSGTDYTLTISSLQPEDFAVYFCQQGNTLPYTFGQ
GTKLEIKGGGGSGGGGSGGGGSQVQLQESGPGLVKPSETLSLTCTVSGVS
LPDYGVSWIRQPPGKGLEWIGVIWGSETTYYQSSLKSRVTISKDNSKNQV
SLKLSSVTAADTAVYYCAKHYYYGGSYAMDYWGQGTLVTVSSTTTPAPRP
PTPAPTIASQPLSLRPEACRPAAGGAVHTRGLDFACDIYIWAPLAGTCGV
LLLSLVITLYCKRGRKKLLYIFKQPFMRPVQTTQEEDGCSCRFPEEEEGG
CELRVKFSRSADAPAYKQGQNQLYNELNLGRREEYDVLDKRRGRDPEMGG
KPRRKNPQEGLYNELQKDKMAEAYSEIGMKGERRRGKGHDGLYQGLSTAT
KDTYDALHMQALPPR (SEQ ID NO: 294)

[0617] Any known CD 19 CAR, for example, the CD 19 antigen binding domain of any known CD19 CAR, in the art can be used in accordance with the present disclosure. For example, LG-740; CD19 CAR described in the US Pat. No. 8,399,645; US Pat. No. 7,446,190; Xu et al., Leuk Lymphoma. 2013 54(2):255-260(2012); Cruz et al., Blood 122(17):2965-2973 (2013); Brentjens et al., Blood, 118(18):4817-4828 (2011); Kochenderfer et al., Blood 116(20):4099-102 (2010); Kochenderfer et al., Blood 122 (25):4129-39(2013); and 16th Annu Meet Am Soc Gen Cell Ther (ASGCT) (May 15-18, Salt Lake City) 2013, Abst 10.

[0618] Exemplary CD19 CARs include CD19 CARs described herein or an anti-CD19 CAR described in Xu et al. Blood 123.24(2014):3750-9; Kochenderfer et al. Blood 122.25(2013):4129-39, Cruz et al. Blood 122.17(2013):2965-73, NCT00586391, NCT01087294, NCT02456350, NCT00840853, NCT02659943, NCT02650999, NCT02640209, NCT01747486, NCT02546739, NCT02656147, NCT02772198, NCT00709033, NCT02081937, NCT00924326, NCT02735083, NCT02794246, NCT02746952, NCT01593696, NCT02134262, NCT01853631, NCT02443831, NCT02277522, NCT02348216, NCT02614066, NCT02030834, NCT02624258, NCT02625480, NCT02030847, NCT02644655, NCT02349698, NCT02813837, NCT02050347, NCT01683279, NCT02529813, NCT02537977, NCT02799550, NCT02672501, NCT02819583, NCT02028455, NCT01840566, NCT01318317, NCT01864889, NCT02706405, NCT01475058, NCT01430390, NCT02146924, NCT02051257, NCT02431988, NCT01815749, NCT02153580, NCT01865617, NCT02208362, NCT02685670, NCT02535364, NCT02631044, NCT02728882, NCT02735291, NCT01860937, NCT02822326, NCT02737085, NCT02465983, NCT02132624, NCT02782351, NCT01493453, NCT02652910, NCT02247609, NCT01029366, NCT01626495, NCT02721407, NCT01044069, NCT00422383, NCT01680991, NCT02794961, or NCT02456207, each of which is incorporated herein by reference in its entirety.

[0619] In some embodiments, CD19 CARs comprise a sequence, for example, a CDR, VH, VL, scFv, or full-CAR sequence, disclosed in Table 2, or a sequence having at least 80%, 85%, 90%, 95%, or 99% identity thereto.

TABLE 2

Amino acid sequences of exemplary anti-CD19 molecules

| | | |
|---|---|---|
| SEQ ID NO | Region | Sequence |
| CTL019 | | |
| 295 | HCDR1 (Kabat) | DYGVS |
| 296 | HCDR2 (Kabat) | VIWGSETTYYNSALKS |
| 297 | HCDR3 (Kabat) | HYYYGGSYAMDY |
| 298 | LCDR1 (Kabat) | RASQDISKYLN |
| 299 | LCDR2 (Kabat) | HTSRLHS |
| 300 | LCDR3 (Kabat) | QQGNTLPYT |
| 301 | CTL019 Full amino acid sequence | MALPVTALLLPLALLLHAARPDIQMTQTTSSLSASLGDRVTISCRASQDISKYLNWYQQKPDGTVKLLIYHTSRLHSGVPSRFSGSGSGTDYSLTISNLEQEDIATYFCQQGNTLPYTFGGGTKLEITGGGGSGGGGSGGGGSEVKLQESGPGLVAPSQSLSVTCTVSGVSLPDYGVSWIRQPPRKGLEWLGVIWGSETTYYNSALKSRLTIIKDNSKSQVFLKMNSLQTDDTAIYYCAKHYYYGGSYAMDYWGQGTSVTVSSTTTPAPRPPTPAPTIASQPLSLRPEACRPAAGGAVHTRGLDFACDIYIWAPLAGTCGVLLLSLVITLYCKRGRKKLLYIFKQPFMRPVQTTQEEDGCSCRFPEEEEGGCELRVKFSRSADAPAYKQGQNQLYNELNLGRREEYDVLDKRRGRDPEMGGKPRRKNPQEGLYNELQKDKMAEAYSEIGMKGERRRGKGHDGLYQGLSTATKDTYDALHMQALPPR |
| 302 | CTL019 Full nucleotide sequence | ATGGCCTTACCAGTGACCGCCTTGCTCCTGCCGCTGGCCTTGCTGCTCCACGCCGCCAGGCCGGACATCCAGATGACACAGACTACATCCTCCCTGTCTGCCTCTCTGGGAGACAGAGTCACCATCAGTTGCAGGGCAAGTCAGGACATTAGTAAATATTTAAATTGGTATCAGCAGAAACCAGATGGAACTGTTAAACTCCTGATCTACCATACATCAAGATTACACTCAGGAGTCCCATCAAGGTTCAGTGGCAGTGGGTCTGGAACAGATTATTCTCTCACCATTAGCAACCTGGAGCAAGAAGATATTGCCACTTACTTTTGCCAACAGGGTAATACGCTTCCGTACACGTTCGGAGGGGGGACCAAGCTGGAGATCACAGGTGGCGGTGGCTCGGGCGGTGGTGGGTCGGGTGGCGGCGGATCTGAGGTGAAACTGCAGGAGTCAGGACCTGGCCTGGTGGCGCCCTCACAGAGCCTGTCCGTCACATGCACTGTCTCAGGGGTCTCATTACCCGACTATGGTGTAAGCTGGATTCGCCAGCCTCCACGAAAGGGTCTGGAGTGGCTGGGAGTAATATGGGGTAGTGAAACCACATACTATAATTCAGCTCTCAAATCCAGACTGACCATCATCAAGGACAACTCCAAGAGCCAAGTTTTCTTAAAAATGAACAGTCTGCAAACTGATGACACAGCCATTTACTACTGTGCCAAACATTATTACTACGGTGGTAGCTATGCTATGGACTACTGGGGCCAAGGAACCTCAGTCACCGTCTCCTCAACCACGACGCCAGCGCCGCGACCACCAACACCGGCGCCCACCATCGCGTCGCAGCCCCTGTCCCTGCGCCCAGAGGCGTGCCGGCCAGCGGCGGGGGGCGCAGTGCACACGAGGGGGCTGGACTTCGCCTGTGATATCTACATCTGGGCGCCCTTGGCCGGGACTTGTGGGGTCCTTCTCCTGTCACTGGTTATCACCCTTTACTGCAAACGGGGCAGAAAGAAACTCCTGTATATATTCAAACAACCATTTATGAGACCAGTACAAACTACTCAAGAGGAAGATGGCTGTAGCTGCCGATTTCCAGAAGAAGAAGAAGGAGGATGTGAACTGAGAGTGAAGTTCAGCAGGAGCGCAGACGCCCCCGCGTACAAGCAGGGCCAGAACCAGCTCTATAACGAGCTCAATCTAGGACGAAGAGAGGAGTACGATGTTTTGGACAAGAGACGTGGCCGGGACCCTGAGATGGGGGGAAAGCCGAGAAGGAAGAACCCTCAGGAAGGCCTGTACAATGAACTGCAGAAAGATAAGATGGCGGAGGCCTACAGTGAGATTGGGATGAAAGGCGAGCGCCGGAGGGGCAAGGGGCACGATGGCCTTTACCAGGGTCTCAGTACAGCCACCAAGGACACCTACGACGCCCTTCACATGCAGGCCCTGCCCCCTCGC |
| 303 | CTL019 scFv domain | DIQMTQTTSSLSASLGDRVTISCRASQDISKYLNWYQQKPDGTVKLLIYHTSRLHSGVPSRFSGSGSGTDYSLTISNLEQEDIATYFCQQGNTLPYTFGGGTKLEITGGGGSGGGGSGGGGSEVKLQESGPGLVAPSQSLSVTCTVSGVSLPDYGVSWIRQPPRKGLEWLGVIWGSETTYYNSALKSRLTIIKDNSKSQVFLKMNSLQTDDTAIYYCAKHYYYGGSYAMDYWGQGTSVTVSS |
| Humanize d CAR2 | | |
| 295 | HCDR1 (Kabat) | DYGVS |
| 304 | HCDR2 (Kabat) | VIWGSETTYYQSSLKS |
| 297 | HCDR3 (Kabat) | HYYYGGSYAMDY |
| 298 | LCDR1 (Kabat) | RASQDISKYLN |
| 299 | LCDR2 (Kabat) | HTSRLHS |
| 300 | LCDR3 (Kabat) | QQGNTLPYT |
| 293 | CAR2 scFv domain - aa (Linker is underlined) | EIVMTQSPATLSLSPGERATLSCRASQDISKYLNWYQQKPGQAPRLLIYHTSRLHSGIPARFSGSGSGTDYTLTISSLQPEDFAVYFCQQGNTLPYTFGQGTKLEIKGGGGSGGGGSGGGGSQVQLQESGPGLVKPSETLSLTCTVSGVSLPDYGVSWIRQPPGKGLEWIGVIWGSETTYYQSSLKSRVTISKDNSKNQVSLKLSSVTAADTAVYYCAKHYYYGGSYAMDYWGQGTLVTVSS |
| 305 | CAR2 scFv domain - nt | atggccctccctgtcaccgccctgctgcttccgctggctcttctgctccacgccgctcggcccgaaattgtgatgacccagtcacccgccactcttagcctttcacccggtgagcgcgcaaccctgtcttgcagagcctcccaagacatctcaaaataccttaattggtatcaacagaagcccggacaggctcctcgccttctgatctaccacaccagccggctccattctggaatccctgccaggttcagcggtagcggatctgggaccgactacaccctcactatcagctcactgcagccagaggacttcgctgtctatttctgtcagcaagggaacaccctgccctacacctttggacagggcaccaagctcgagattaaaggtggaggtggcagcggaggaggtgggtccggcggtggaggaagccaggtccaactccaagaaagcggaccgggtcttgtgaagccatcagaaactctttcactgacttgtactgtgagcggagtgtctctccccgattacggggtgtcttggatcagacagccaccggggaagggtctggaatggattggagtgatttggggctctgagactacttactaccaatcatccctcaagtcacgcgtcaccatctcaaaggacaactctaagaatcaggtgtcactgaaactgtcatctgtgaccgcagccgacaccgccgtgtactattgcgctaagcattactattatggcgggagctacgcaatggattactggggacagggtactctggtcaccgtgtccagccaccaccatcatcaccatcaccat |
| 306 | CAR 2 -Full - aa | MALPVTALLLPLALLLHAARPEIVMTQSPATLSLSPGERATLSCRASQDISKYLNWYQQKPGQAPRLLIYHTSRLHSGIPARFSGSGSGTDYTLTISSLQPEDFAVYFCQQGNTLPYTFGQGTKLEIKGGGGSGGGGSGGGGSQVQLQESGPGLVKPSETLSLTCTVSGVSLPDYGVSWIRQPPGKGLEWIGVIWGSETTYYQSSLKSRVTISKDNSKNQVSLKLSSVTAADTAVYYCAKHYYYGGSYAMDYWGQGTLVTVSSTTTPAPRPPTPAPTIASQPLSLRPEACRPAAGGAVHTRGLDFACDIYIWAPLAGTCGVLLLSLVITLYCKRGRKKLLYIFKQPFMRPVQTTQEEDGCSCRFPEEEEGGCELRVKFSRSADAPAYKQGQNQLYNELNLGRREEYDVLDKRRGRDPEMGGKPRRKNPQEGLYNELQKDKMAEAYSEIGMKGERRRGKGHDGLYQGLSTATKDTYDALHMQALPPR |
| 307 | CAR 2 -Full - nt | atggccctccctgtcaccgccctgctgcttccgctggctcttctgctccacgccgctcggcccgaaattgtgatgacccagtcacccgccactcttagcctttcacccggtgagcgcgcaaccctgtcttgcagagcctcccaagacatctcaaaataccttaattggtatcaacagaagcccggacaggctcctcgccttctgatctaccacaccagccggctccattctggaatccctgccaggttcagcggtagcggatctgggaccgactacaccctcactatcagctcactgcagccagaggacttcgctgtctatttctgtcagcaagggaacaccctgccctacacctttggacagggcaccaagctcgagattaaaggtggaggtggcagcggaggaggtgggtccggcggtggaggaagccaggtccaactccaagaaagcggaccgggtcttgtgaagccatcagaaactctttcactgacttgtactgtgagcggagtgtctctccccgattacggggtgtcttggatcagacagccaccggggaagggtctggaatggattggagtgatttggggctctgagactacttactaccaatcatccctcaagtcacgcgtcaccatctcaaaggacaactctaagaatcaggtgtcactgaaactgtcatctgtgaccgcagccgacaccgccgtgtactattgcgctaagcattactattatggcgggagctacgcaatggattactggggacagggtactctggtcaccgtgtccagcaccactaccccagcaccgaggccacccaccccggctcctaccatcgcctcccagcctctgtccctgcgtccggaggcatgtagacccgcagctggtggggccgtgcatacccggggtcttgacttcgcctgcgatatctacatttgggcccctctggctggtacttgcggggtcctgctgctttcactcgtgatcactctttactgtaagcgcggtcggaagaagctgctgtacatctttaagcaacccttcatgaggcctgtgcagactactcaagaggaggacggctgttcatgccggttcccagaggaggaggaaggcggctgcgaactgcgcgtgaaattcagccgcagcgcagatgctccagcctacaagcaggggcagaaccagctctacaacgaactcaatcttggtcggagagaggagtacgacgtgctggacaagcggagaggacgggacccagaaatgggcgggaagccgcgcagaaagaatccccaagagggcctgtacaacgagctccaaaaggataagatggcagaagcctatagcgagattggtatgaaaggggaacgcagaagaggcaaaggccacgacggactgtaccagggactcagcaccgccaccaaggacacctatgacgctcttcacatgcaggccctgccgcctcgg |
| 349 | CAR 2A-Full amino acid sequence; signal peptide underlined | MALPVTALLLPLALLLHAARPEIVMTQSPATLSLSPGERATLSCRASQDISKYLNWYQQKPGQAPRLLIYHTSRLHSGIPARFSGSGSGTDYTLTISSLQPEDFAVYFCQQGNTLPYTFGQGTKLEIKGGGGSGGGGSGGGGSQVQLQESGPGLVKPSETLSLTCTVSGVSLPDYGVSWIRQPPGKGLEWIGVIWGSETTYYQSSLKSRVTISKDNSKNQVSLKLSSVTAADTAVYYCAKHYYYGGSYAMDYWGQGTLVTVSSTTTPAPRPPTPAPTIASQPLSLRPEACRPAAGGAVHTRGLDFACDIYIWAPLAGTCGVLLLSLVITLYCKRGRKKLLYIFKQPFMRPVQTTQEEDGCSCRFPEEEEGGCELRVKFSRSADAPAYQQGQNQLYNELNLGRREEYDVLDKRRGRDPEMGGKPRRKNPQEGLYNELQKDKMAEAYSEIGMKGERRRGKGHDGLYQGLSTATKDTYDALHMQALPPR |
| 225 | CAR 2A -amino acid sequence; no signal peptide | EIVMTQSPATLSLSPGERATLSCRASQDISKYLNWYQQKPGQAPRLLIYHTSRLHSGIPARFSGSGSGTDYTLTISSLQPEDFAVYFCQQGNTLPYTFGQGTKLEIKGGGGSGGGGSGGGGSQVQLQESGPGLVKPSETLSLTCTVSGVSLPDYGVSWIRQPPGKGLEWIGVIWGSETTYYQSSLKSRVTISKDNSKNQVSLKLSSVTAADTAVYYCAKHYYYGGSYAMDYWGQGTLVTVSSTTTPAPRPPTPAPTIASQPLSLRPEACRPAAGGAVHTRGLDFACDIYIWAPLAGTCGVLLLSLVITLYCKRGRKKLLYIFKQPFMRPVQTTQEEDGCSCRFPEEEEGGCELRVKFSRSADAPAYQQGQNQLYNELNLGRREEYDVLDKRRGRDPEMGGKPRRKNPQEGLYNELQKDKMAEAYSEIGMKGERRRGKGHDGLYQGLSTATKDTYDALHMQALPPR |
| 354 | CAR 2A full nucleic acid sequence; signal peptide and stop codon underlined | atggccctccctgtcaccgccctgctgcttccgctggctcttctgcctccacgctgaattgtgatgacccagtcacccgccactcttagcctttcacccggtgagcgcgcaaccctgtcttgcagagcctcccaagacatctcaaaataccttaattggtatcaacagaagcccggacaggctcctcgccttctgatctaccacaccagccggctccattctggaatccctgccaggttcagcggtagcggatctgggaccgactacaccctcactatcagctcactgcagccagaggacttcgctgtctatttctgtcagcaagggaacaccctgccctacacctttggacagggcaccaagctcgagattaaaggtggaggtggcagcggaggaggtgggtccggcggtggaggaagccaggtccaactccaagaaagcggaccgggtcttgtgaagccatcagaaactctttcactgacttgtactgtgagcggagtgtctctccccgattacggggtgtcttggatcagacagccaccggggaagggtctggaatggattggagtgatttggggctctgagactacttactaccaatcatccctcaagtcacgcgtcaccatctcaaaggacaactctaagaatcaggtgtcactgaaactgtcatctgtgaccgcagccgacaccgccgtgtactattgcgctaagcattactattatggcgggagctacgcaatggattactggggacagggtactctggtcaccgtgtccagcaccactaccccagcaccgaggccacccaccccggctcctaccatcgcctcccagcctctgtccctgcgtccggaggcatgtagacccgcagctggtggggccgtgcatacccggggtcttgacttcgcctgcgatatctacatttgggcccctctggctggtacttgcggggtcctgctgctttcactcgtgatcactctttactgtaagcgcggtcggaagaagctgctgtacatctttaagcaacccttcatgaggcctgtgcagactactcaagaggaggacggctgttcatgccggttcccagaggaggaggaaggcggctgcgaactgcgcgtgaaattcagccgcagcgcagatgctccagcctaccagcaggggcagaaccagctctacaacgaactcaatcttggtcggagagaggagtacgacgtgctggacaagcggagaggacgggacccagaaatgggcgggaagccgcgcagaaagaatccccaagagggcctgtacaacgagctccaaaaggataagatggcagaagcctatagcgagattggtatgaaaggggaacgcagaagaggcaaaggccacgacggactgtaccagggactcagcaccgccaccaaggacacctatgacgctcttcacatgcaggccctgccgcctcggtaa |
| 355 | CAR 2A nucleic acid sequence; signal peptide underlined; no stop codon | atggccctccctgtcaccgccctgctgcttccgctgctcttctgctccacgccgctcggcccgaaattgtgatgacccagtcacccgccactcttagcctttcacccggtgagcgcgcaaccctgtcttgcagagcctcccaagacatctcaaaataccttaattggtatcaacagaagcccggacaggctcctcgccttctgatctaccacaccagccggctccattctggaatccctgccaggttcagcggtagcggatctgggaccgactacaccctcactatcagctcactgcagccagaggacttcgctgtctatttctgtcagcaagggaacaccctgccctacacctttggacagggcaccaagctcgagattaaaggtggaggtggcagcggaggaggtgggtccggcggtggaggaagccaggtccaactccaagaaagcggaccgggtcttgtgaagccatcagaaactctttcactgacttgtactgtgagcggagtgtctctccccgattacggggtgtcttggatcagacagccaccggggaagggtctggaatggattggagtgatttggggctctgagactacttactaccaatcatccctcaagtcacgcgtcaccatctcaaaggacaactctaagaatcaggtgtcactgaaactgtcatctgtgaccgcagccgacaccgccgtgtactattgcgctaagcattactattatggcgggagctacgcaatggattactggggacagggtactctggtcaccgtgtccagcaccactaccccagcaccgaggccacccaccccggctcctaccatcgcctcccagcctctgtccctgcgtccggaggcatgtagacccgcagctggtggggccgtgcatacccggggtcttgacttcgcctgcgatatctacatttgggcccctctggctggtacttgcggggtcctgctgctttcactcgtgatcactctttactgtaagcgcggtcggaagaagctgctgtacatctttaagcaacccttcatgaggcctgtgcagactactcaagaggaggacggctgttcatgccggttcccagaggaggaggaaggcggctgcgaactgcgcgtgaaattcagccgcagcgcagatgctccagcctaccagcaggggcagaaccagctctacaacgaactcaatcttggtcggagagaggagtacgacgtgctggacaagcggagaggacgggacccagaaatgggcgggaagccgcgcagaaagaatccccaagagggcctgtacaacgagctccaaaaggataagatggcagaagcctatagcgagattggtatgaaaggggaacgcagaagaggcaaaggccacgacggactgtaccagggactcagcaccgccaccaaggacacctatgacgctcttcacatgcaggccctgccgcctcgg |
| 356 | CAR 2A nucleic acid sequence; no signal peptide; stop codon underlined | gaaattgtgatgacccagtcacccgccactcttagcctttcacccggtgagcgcgcaaccctgtcttgcagagcctcccaagacatctcaaaataccttaattggtatcaacagaagcccggacaggctcctcgccttctgatctaccacaccagccggctccattctggaatccctgccaggttcagcggtagcggatctgggaccgactacaccctcactatcagctcactgcagccagaggacttcgctgtctatttctgtcagcaagggaacaccctgccctacacctttggacagggcacca agctcgagattaaaggtggaggtggcagcggaggaggtgggtccggcggtggaggaagccaggtccaactccaagaaagcggaccgggtcttgtgaagccatcagaaactctttcactgacttgtactgtgagcggagtgtctctccccgattacggggtgtcttggatcagacagccaccggggaagggtctggaatggattggagtgatttggggctctgagactacttactaccaatcatccctcaagtcacgcgtcaccatctcaaaggacaactctaagaatcaggtgtcactgaaactgtcatctgtgaccgcagccgacaccgccgtgtactattgcgctaagcattactattatggcgggagctacgcaatggattactggggacagggtactctggtcaccgtgtccagcaccactaccccagcaccgaggccacccaccccggctcctaccatcgcctcccagcctctgtccctgcgtccggaggcatgtagacccgcagctggtggggccgtgcatacccggggtcttgacttcgcctgcgatatctacatttgggcccctctggctggtacttgcggggtcctgctgctttcactcgtgatcactctttactgtaagcgcggtcggaagaagctgctgtacatctttaagcaacccttcatgaggcctgtgcagactactcaagaggaggacggctgttcatgccggttcccagaggaggaggaaggcggctgcgaactgcgcgtgaaattcagccgcagcgcagatgctccagcctaccagcaggggcagaaccagctctacaacgaactcaatcttggtcggagagaggagtacgacgtgctggacaagcggagaggacgggacccagaaatgggcgggaagccgcgcagaaagaatccccaagagggcctgtacaacgagctccaaaaggataagatggcagaagcctatagcgagattggtatgaaaggggaacgcagaagaggcaaaggccacgacggactgtaccagggactcagcaccgccaccaaggacacctatgacgctcttcacatgcaggccctgccgcctcggtaa |
| SEQ ID NO: 417 | CAR 2A nucleic acid sequence; no signal peptide; no stop codon | gaaattgtgatgacccagtcacccgccactcttagcctttcacccggtgagcgcgcaaccctgtcttgcagagcctcccaagacatctcaaaataccttaattggtatcaacagaagcccggacaggctcctcgccttctgatctaccacaccagccggctccattctggaatccctgccaggttcagcggtagcggatctgggaccgactacaccctcactatcagctcactgcagccagaggacttcgctgtctatttctgtcagcaagggaacaccctgccctacacctttggacagggcaccaagctcgagattaaaggtggaggtggcagcggaggaggtgggtccggcggtggaggaagccaggtccaactccaagaaagcggaccgggtcttgtgaagccatcagaaactctttcactgacttgtactgtgagcggagtgtctctccccgattacggggtgtcttggatcagacagccaccggggaagggtctggaatggattggagtgatttggggctctgagactacttactaccaatcatccctcaagtcacgcgtcaccatctcaaaggacaactctaagaatcaggtgtcactgaaactgtcatctgtgaccgcagccgacaccgccgtgtactattgcgctaagcattactattatggcgggagctacgcaatggattactggggacagggtactctggtcaccgtgtccagcaccactaccccagcaccgaggccacccaccccggctcctaccatcgcctcccagcctctgtccctgcgtccggaggcatgtagacccgcagctggtggggccgtgcatacccggggtcttgacttcgcctgcgatatctacatttgggcccctctggctggtacttgcggggtcctgctgctttcactcgtgatcactctttactgtaagcgcggtcggaagaagctgctgtacatctttaagcaacccttcatgaggcctgtgcagactactcaagaggaggacggctgttcatgccggttcccagaggaggaggaaggcggctgcgaactgcgcgtgaaattcagccgcagcgcagatgctccagcctaccagcaggggcagaaccagctctacaacgaactcaatcttggtcggagagaggagtacgacgtgctggacaagcggagaggacgggacccagaaatgggcgggaagccgcgcagaaagaatccccaagagggcctgtacaacgagctccaaaaggataagatggcagaagcctatagcgagattggtatgaaaggggaacgcagaagaggcaaaggccacgacggactgtaccagggactcagcaccgccaccaaggacacctatgacgctcttcacatgcaggccctgccgcctcgg |
| SEQ ID NO: 250 | Anti-CD19 VH | QVQLQESGPGLVKPSETLSLTCTVSGVSLPDYGVSWIRQPPGKGLEWIGVIWGSETTYYQSSLKSRVTISKDNSKNQVSLKLSSVTAADTAVYYCAKHYYYGGSYAMDYWGQGTLVTVSS |
| SEQ ID NO: 251 | Anti-CD19 VL | EIVMTQSPATLSLSPGERATLSCRASQDISKYLNWYQQKPGQAPRLLIYHTSRLHSGIPARFSGSGSGTDYTLTISSLQPEDFAVYFCQQGNTLPYTFGQGTKLEIK |
| SEQ ID NO: 331 | VH | QVQLQESGPGLVKPSETLSLTCTVSGVSLPDYGVSWIRQPPGKCLEWIGVIWGSETTYYQSSLKSRVTISKDNSKNQVSLKLSSVTAADTAVYYCAKHYYYGGSYAMDYWGQGTLVTVSS |
| SEQ ID NO: 332 | VL | EIVMTQSPATLSLSPGERATLSCRASQDISKYLNWYQQKPGQAPRLLIYHTSRLHSGIPARFSGSGSGTDYTLTISSLQPEDFAVYFCQQGNTLPYTFGCGTKLEIK |

### BCMA CAR

[0620] In some embodiments, the CAR-expressing cell described herein is a BCMA CAR-expressing cell (for example, a cell expressing a CAR that binds to human BCMA). Exemplary BCMA CARs can include sequences disclosed in Table 1 or 16 of WO2016/014565, incorporated herein by reference. The BCMA CAR construct can include an optional leader sequence; an optional hinge domain, for example, a CD8 hinge domain; a transmembrane domain, for example, a CD8 transmembrane domain; an intracellular domain, for example, a 4-1BB intracellular domain; and a functional signaling domain, for example, a CD3 zeta domain. In certain embodiments, the domains are contiguous and in the same reading frame to form a single fusion protein. In other embodiments, the domains are in separate polypeptides, for example, as in an RCAR molecule as described herein.

[0621] In some embodiments, the BCMA CAR molecule includes one or more CDRs, VH, VL, scFv, or full-length sequences of BCMA-1, BCMA-2, BCMA-3, BCMA-4, BCMA-5, BCMA-6, BCMA-7, BCMA-8, BCMA-9, BCMA-10, BCMA-11, BCMA-12, BCMA-13, BCMA-14, BCMA-15, 149362, 149363, 149364, 149365, 149366, 149367, 149368, 149369, BCMA_EBB-C1978-A4, BCMA_EBB-C1978-G1, BCMA_EBB-C1979-C1, BCMA_EBB-C1978-C7, BCMA_EBB-C1978-D10, BCMA_EBB-C1979-C12, BCMA_EBB-C1980-G4, BCMA_EBB-C1980-D2, BCMA_EBB-C1978-A10, BCMA_EBB-C1978-D4, BCMA_EBB-C1980-A2, BCMA_EBB-C1981-C3, BCMA_EBB-C1978-G4, A7D12.2, C11D5.3, C12A3.2, or C13F12.1 disclosed in WO2016/014565, or a sequence substantially (for example, 95-99%) identical thereto.

[0622] Additional exemplary BCMA-targeting sequences that can be used in the anti-BCMA CAR constructs are disclosed in WO 2017/021450, WO 2017/011804, WO 2017/025038, WO 2016/090327, WO 2016/130598, WO 2016/210293, WO 2016/090320, WO 2016/014789, WO 2016/094304, WO 2016/154055, WO 2015/166073, WO 2015/188119, WO 2015/158671, US 9,243,058, US 8,920,776, US 9,273,141, US 7,083,785, US 9,034,324, US 2007/0049735, US 2015/0284467, US 2015/0051266, US 2015/0344844, US 2016/0131655, US 2016/0297884, US 2016/0297885, US 2017/0051308, US 2017/0051252, US 2017/0051252, WO 2016/020332, WO 2016/087531, WO 2016/079177, WO 2015/172800, WO 2017/008169, US 9,340,621, US 2013/0273055, US 2016/0176973, US 2015/0368351, US 2017/0051068, US 2016/0368988, and US 2015/0232557, herein incorporated by reference in their entirety. In some embodiments, additional exemplary BCMA CAR constructs are generated using the VH and VL sequences from PCT Publication WO2012/0163805 (the contents of which are hereby incorporated by reference in its entirety).

[0623] In some embodiments, BCMA CARs comprise a sequence, for example, a CDR, VH, VL, scFv, or full-CAR sequence, disclosed in Tables 3-15, or a sequence having at least 80%, 85%, 90%, 95%, or 99% identity thereto. In some embodiments, the antigen binding domain comprises a human antibody or a human antibody fragment. In some embodiments, the human anti-BCMA binding domain comprises one or more (for example, all three) LC CDR1, LC CDR2, and LC CDR3 of a human anti-BCMA binding domain described herein (for example, in Tables 3-10 and 12-15), and/or one or more (for example, all three) HC CDR1, HC CDR2, and HC CDR3 of a human anti-BCMA binding domain described herein (for example, in Tables 3-10 and 12-15). In some embodiments, the human anti-BCMA binding domain comprises a human VL described herein (for example, in Tables 3, 7, and 12) and/or a human VH described herein (for example, in Tables 3, 7, and 12). In some embodiments, the anti-BCMA binding domain is a scFv comprising a VL and a VH of an amino acid sequence of Tables 3, 7, and 12. In some embodiments, the anti-BCMA binding domain (for example, an scFv) comprises: a VL comprising an amino acid sequence having at least one, two or three modifications (for example, substitutions, for example, conservative substitutions) but not more than 30, 20 or 10 modifications (for example, substitutions, for example, conservative substitutions) of an amino acid sequence provided in Tables 3, 7, and 12, or a sequence with 95-99% identity with an amino acid sequence of Tables 3, 7, and 12, and/or a VH comprising an amino acid sequence having at least one, two or three modifications (for example, substitutions, for example, conservative substitutions) but not more than 30, 20 or 10 modifications (for example, substitutions, for example, conservative substitutions) of an amino acid sequence provided in Tables 3, 7, and 12, or a sequence with 95-99% identity to an amino acid sequence of Tables 3, 7, and 12.

TABLE 3

Amino acid and nucleic acid sequences of exemplary PALLAS-derived anti-BCMA mlecules

| SEQ ID NO | Name/ Description | Sequence |
|---|---|---|
| R1B6 | | |
| SEQ ID NO: 44 | HCDR1 (Kabat) | SYAMS |
| SEQ ID NO: 45 | HCDR2 (Kabat) | AISGSGGSTYYADSVKG |
| SEQ ID NO: 46 | HCDR3 (Kabat) | REWVPYDVSWYFDY |
| SEQ ID NO: 47 | HCDR1 (Chothia) | GFTFSSY |
| SEQ ID NO: 48 | HCDR2 (Chothia) | SGSGGS |
| SEQ ID NO: 46 | HCDR3 (Chothia) | REWVPYDVSWYFDY |
| SEQ ID NO: 49 | HCDR1 (IMGT) | GFTFSSYA |
| SEQ ID NO: 50 | HCDR2 (IMGT) | ISGSGGST |
| SEQ ID NO: 51 | HCDR3 (IMGT) | ARREWVPYDVSWYFDY |
| SEQ ID NO: 52 | VH | EVQLLESGGGLVQPGGSLRLSCAASGFTFSSYAMSWVRQAPGKGLEWVSAISGSGGSTYYADSVKGRFTISRDNSKNTLYLQMNSLRAEDTAVYYCARREWVPYDVSWYFDYWGQGTLVTVSS |
| SEQ ID NO: 53 | DNA VH | GAAGTGCAGTTGCTGGAGTCAGGCGGAGGACTGGTGCAGCCCGGAGGATCGCTTCGCTTGAGCTGCGCAGCCTCAGGCTTTACCTTCTCCTCCTACGCCATGTCCTGGGTCAGACAGGCTCCCGGGAAGGGACTGGAATGGGTGTCCGCCATTAGCGGTTCCGGCGGAAGCACTTACTATGCCGACTCTGTGAAGGGCCGCTTCACTATCTCCCGGGACAACTCCAAGAACACCCTGTATCTCCAAATGAATTCCCTGAGGGCCGAAGATACCGCGGTGTACTACTGCGCTAGACGGGAGTGGGTGCCCTACGATGTCAGCTGGTACTTCGACTACTGGGGACAGGGCACTCTCGTGACTGTGTCCTCC |
| SEQ ID NO: 54 | LCDR1 (Kabat) | RASQSISSYLN |
| SEQ ID NO: 55 | LCDR2 (Kabat) | AASSLQS |
| SEQ ID NO: 56 | LCDR3 (Kabat) | QQSYSTPLT |
| SEQ ID NO: 57 | LCDR1 (Chothia) | SQSISSY |
| SEQ ID NO: 58 | LCDR2 (Chothia) | AAS |
| SEQ ID NO: 59 | LCDR3 (Chothia) | SYSTPL |
| SEQ ID NO: 60 | LCDR1 (IMGT) | QSISSY |
| SEQ ID NO: 58 | LCDR2 (IMGT) | AAS |
| SEQ ID NO: 56 | LCDR3 (IMGT) | QQSYSTPLT |
| SEQ ID NO: 61 | VL | [sequence omitted] |
| SEQ ID NO: 62 | DNA VL | GACATTCAAATGACTCAGTCCCCGTCCTCCCTCTCCGCCTCCGTGGGAGATCGCGTCACGATCACGTGCAGGGCCAGCCAGAGCATCTCCAGCTACCTGAACTGGTACCAGCAGAAGCCAGGGAAGGCACCGAAGCTCCTGATCTACGCCGCTAGCTCGCTGCAGTCCGGCGTCCCTTCACGGTTCTCGGGATCGGGCTCAGGCACCGACTTCACCCTGACCATTAGCAGCCTGCAGCCGGAGGACTTCGCGACATACTAC |
| | | TGTCAGCAGTCATACTCCACCCCTCTGACCTTCGGCCAAGGGACCAAAGTGGAGATCAAG |
| SEQ ID NO: 63 | Linker | GGGGSGGGGSGGGGSGGGGS |
| SEQ ID NO: 64 | scFv (VH-linker-VL) | EVQLLESGGGLVQPGGSLRLSCAASGFTFSSYAMSWVRQAPGKGLEWVSAISGSGGSTYYADSVKGRFTISRDNSKNTLYLQMNSLRAEDTAVYYCARREWVPYDVSWYFDYWGQGTLVTVSSGGGGSGGGGSGGGGSGGGGSDIQMTQSPSSLSASVGDRVTITCRASQSISSYLNWYQQKPGKAPKLLIYAASSLQSGVPSRFSGSGSGTDFTLTISSLQPEDFATYYCQQSYSTPLTFGQGTKVEIK |
| SEQ ID NO: 65 | DNA scFv | GAAGTGCAGTTGCTGGAGTCAGGCGGAGGACTGGTGCAGCCCGGAGGATCGCTTCGCTTGAGCTGCGCAGCCTCAGGCTTTACCTTCTCCTCCTACGCCATGTCCTGGGTCAGACAGGCTCCCGGGAAGGGACTGGAATGGGTGTCCGCCATTAGCGGTTCCGGCGGAAGCACTTACTATGCCGACTCTGTGAAGGGCCGCTTCACTATCTCCCGGGACAACTCCAAGAACACCCTGTATCTCCAAATGAATTCCCTGAGGGCCGAAGATACCGCGGTGTACTACTGCGCTAGACGGGAGTGGGTGCCCTACGATGTCAGCTGGTACTTCGACTACTGGGGACAGGGCACTCTCGTGACTGTGTCCTCCGGTGGTGGTGGATCGGGGGGTGGTGGTTCGGGCGGAGGAGGATCTGGAGGAGGAGGGTCGGACATTCAAATGACTCAGTCCCCGTCCTCCCTCTCCGCCTCCGTGGGAGATCGCGTCACGATCACGTGCAGGGCCAGCCAGAGCATCTCCAGCTACCTGAACTGGTACCAGCAGAAGCCAGGGAAGGCACCGAAGCTCCTGATCTACGCCGCTAGCTCGCTGCAGTCCGGCGTCCCTTCACGGTTCTCGGGATCGGGCTCAGGCACCGACTTCACCCTGACCATTAGCAGCCTGCAGCCGGAGGACTTCGCGACATACTACTGTCAGCAGTCATACTCCACCCCTCTGACCTTCGGCCAAGGGACCAAAGTGGAGATCAAG |
| SEQ ID NO: 66 | Full CAR amino acid sequence | EVQLLESGGGLVQPGGSLRLSCAASGFTFSSYAMSWVRQAPGKGLEWVSAISGSGGSTYYADSVKGRFTISRDNSKNTLYLQMNSLRAEDTAVYYCARREWVPYDVSWYFDYWGQGTLVTVSSGGGGSGGGGSGGGGSGGGGSDIQMTQSPSSLSASVGDRVTITCRASQSISSYLNWYQQKPGKAPKLLIYAASSLQSGVPSRFSGSGSGTDFTLTISSLQPEDFATYYCQQSYSTPLTFGQGTKVEIKTTTPAPRPPTPAPTIASQPLSLRPEACRPAAGGAVHTRGLDFACDIYIWAPLAGTCGVLLLSLVITLYCKRGRKKLLYIFKQPFMRPVQTTQEEDGCSCRFPEEEEGGCELRVKFSRSADAPAYQQGQNQLYNELNLGRREEYDVLDKRRGRDPEMGGKPRRKNPQEGLYNELQKDKMAEAYSEIGMKGERRRGKGHDGLYQGLSTATKDTYDALHMQALPPR |
| SEQ ID NO: 67 | Full CAR DNA sequence | GAAGTGCAGTTGCTGGAGTCAGGCGGAGGACTGGTGCAGCCCGGAGGATCGCTTCGCTTGAGCTGCGCAGCCTCAGGCTTTACCTTCTCCTCCTACGCCATGTCCTGGGTCAGACAGGCTCCCGGGAAGGGACTGGAATGGGTGTCCGCCATTAGCGGTTCCGGCGGAAGCACTTACTATGCCGACTCTGTGAAGGGCCGCTTCACTATCTCCCGGGACAACTCCAAGAACACCCTGTATCTCCAAATGAATTCCCTGAGGGCCGAAGATACCGCGGTGTACTACTGCGCTAGACGGGAGTGGGTGCCCTACGATGTCAGCTGGTACTTCGACTACTGGGGACAGGGCACTCTCGTGACTGTGTCCTCCGGTGGTGGTGGATCGGGGGGTGGTGGTTCGGGCGGAGGAGGATCTGGAGGAGGAGGGTCGGACATTCAAATGACTCAGTCCCCGTCCTCCCTCTCCGCCTCCGTGGGAGATCGCGTCACGATCACGTGCAGGGCCAGCCAGAGCATCTCCAGCTACCTGAACTGGTACCAGCAGAAGCCAGGGAAGGCACCGAAGCTCCTGATCTACGCCGCTAGCTCGCTGCAGTCCGGCGTCCCTTCACGGTTCTCGGGATCGGGCTCAGGCACCGACTTCACCCTGACCATTAGCAGCCTGCAGCCGGAGGACTTCGCGACATACTACTGTCAGCAGTCATACTCCACCCCTCTGACCTTCGGCCAAGGGACCAAAGTGGAGATCAAGACCACTACCCCAGCACCGAGGCCACCCACCCCGGCTCCTACCATCGCCTCCCAGCCTCTGTCCCTGCGTCCGGAGGCATGTAGACCCGCAGCTGGTGGGGCCGTGCATACCCGGGGTCTTGACTTCGCCTGCGATATCTACATTTGGGCCCCTCTGGCTGGTACTTGCGGGGTCCTGCTGCTTTCACTCGTGATCACTCTTTACTGTAAGCGCGGTCGGAAGAAGCTGCTGTACATCTTTAAGCAACCCTTCATGAGGCCTGTGCAGACTACTCAAGAGGAGGACGGCTGTTCATGCCGGTTCCCAGAGGAGGAGGAAGGCGGCTGCGAACTGCGCGTGAAATTCAGCCGCAGCGCAGATGCTCCAGCCTACCAGCAGGGGCAGAACCAGCTCTACAACGAACTCAATCTTGGTCGGAGAGAGGAGTACGACGTGCTGGACAAGCGGAGAGGACGGGACCCAGAAATGGGCGGGAAGCCGCGCAGAAAGAATCCCCAAGAGGGCCTGTACAACGAGCTCCAAAAGGATAAGATGGCAGAAGCCTATAGCGAGATTGGTATGAAAGGGGAACGCAGAAGAGGCAAAGGCCACGACGGACTGTACCAGGGACTCAGCACCGCCACCAAGGACACCTATGACGCTCTTCACATGCAGGCCCTGCCGCCTCGG |
| R1F2 | | |
| SEQ ID NO: 44 | HCDR1 (Kabat) | SYAMS |
| SEQ ID NO: 45 | HCDR2 (Kabat) | AISGSGGSTYYADSVKG |
| SEQ ID NO: 68 | HCDR3 (Kabat) | REWWYDDWYLDY |
| SEQ ID NO: 47 | HCDR1 (Chothia) | GFTFSSY |
| SEQ ID NO: 48 | HCDR2 (Chothia) | SGSGGS |
| SEQ ID NO: 68 | HCDR3 (Chothia) | REWWYDDWYLDY |
| SEQ ID NO: 49 | HCDR1 (IMGT) | GFTFSSYA |
| SEQ ID NO: 50 | HCDR2 (IMGT) | ISGSGGST |
| SEQ ID NO: 69 | HCDR3 (IMGT) | ARREWWYDDWYLDY |
| SEQ ID NO: 70 | VH | EVQLLESGGGLVQPGGSLRLSCAASGFTFSSYAMSWVRQAPGKGLEWVSAISGSGGSTYYADSVKGRFTISRDNSKNTLYLQMNSLRAEDTAVYYCARREWWYDDWYLDYWGQGTLVTVSS |
| SEQ ID NO: 71 | DNA VH | GAAGTGCAGTTGCTGGAGTCAGGCGGAGGACTGGTGCAGCCCGGAGGATCGCTTCGCTTGAGCTGCGCAGCCTCAGGCTTTACCTTCTCCTCCTACGCCATGTCCTGGGTCAGACAGGCTCCCGGGAAGGGACTGGAATGGGTGTCCGCCATTAGCGGTTCCGGCGGAAGCACTTACTATGCCGACTCTGTGAAGGGCCGCTTCACTATCTCCCGGGACAACTCCAAGAACACCCTGTATCTCCAAATGAATTCCCTGAGGGCCGAAGATACCGCGGTGTACTACTGCGCTAGACGGGAGTGGTGGTACGACGATTGGTACCTGGACTACTGGGGACAGGGCACTCTCGTGACTGTGTCCTCC |
| SEQ ID NO: 54 | LCDR1 (Kabat) | RASQSISSYLN |
| SEQ ID NO: 55 | LCDR2 (Kabat) | AASSLQS |
| SEQ ID NO: 56 | LCDR3 (Kabat) | QQSYSTPLT |
| SEQ ID NO: 57 | LCDR1 (Chothia) | SQSISSY |
| SEQ ID NO: 58 | LCDR2 (Chothia) | AAS |
| SEQ ID NO: 59 | LCDR3 (Chothia) | SYSTPL |
| SEQ ID NO: 60 | LCDR1 (IMGT) | QSISSY |
| SEQ ID NO: 58 | LCDR2 (IMGT) | AAS |
| SEQ ID NO: 56 | LCDR3 (IMGT) | QQSYSTPLT |
| SEQ ID NO: 61 | VL | [sequence omitted] |
| SEQ ID NO: 62 | DNA VL | GACATTCAAATGACTCAGTCCCCGTCCTCCCTCTCCGCCTCCGTGGGAGATCGCGTCACGATCACGTGCAGGGCCAGCCAGAGCATCTCCAGCTACCTGAACTGGTACCAGCAGAAGCCAGGGAAGGCACCGAAGCTCCTGATCTACGCCGCTAGCTCGCTGCAGTCCGGCGTCCCTTCACGGTTCTCGGGATCGGGCTCAGGCACCGACTTCACCCTGACCATTAGCAGCCTGCAGCCGGAGGACTTCGCGACATACTACTGTCAGCAGTCATACTCCACCCCTCTGACCTTCGGCCAAGGGACCAAAGTGGAGATCAAG |
| SEQ ID NO: 63 | Linker | GGGGSGGGGSGGGGSGGGGS |
| SEQ ID NO: 72 | scFv (VH-linker-VL) | EVQLLESGGGLVQPGGSLRLSCAASGFTFSSYAMSWVRQAPGKGLEWVSAISGSGGSTYYADSVKGRFTISRDNSKNTLYLQMNSLRAEDTAVYYCARREWWYDDWYLDYWGQGTLVTVSSGGGGSGGGGSGGGGSGGGGSDIQMTQSPSSLSASVGDRVTITCRASQSISSYLNWYQQKPGKAPKLLIYAASSLQSGVPSRFSGSGSGTDFTLTISSLQPEDFATYYCQQSYSTPLTFGQGTKVEIK |
| SEQ ID NO: 73 | DNA scFv | GAAGTGCAGTTGCTGGAGTCAGGCGGAGGACTGGTGCAGCCCGGAGGATCGCTTCGCTTGAGCTGCGCAGCCTCAGGCTTTACCTTCTCCTCCTACGCCATGTCCTGGGTCAGACAGGCTCCCGGGAAGGGACTGGAATGGGTGTCCGCCATTAGCGGTTCCGGCGGAAGCACTTACTATGCCGACTCTGTGAAGGGCCGCTTCACTATCTCCCGGGACAACTCCAAGAACACCCTGTATCTCCAAATGAATTCCCTGAGGGCCGAAGATACCGCGGTGTACTACTGCGCTAGACGGGAGTGGTGGTACGACGATTGGTACCTGGACTACTGGGGACAGGGCACTCTCGTGACTGTGTCCTCCGGTGGTGGTGGATCGGGGGGTGGTGGTTCGGGCGGAGGAGGATCTGGAGGAGGAGGGTCGGACATTCAAATGACTCAGTCCCCGTCCTCCCTCTCCGCCTCCGTGGGAGATCGCGTCACGATCACGTGCAGGGCCAGCCAGAGCATCTCCAGCTACCTGAACTGGTACCAGCAGAAGCCAGGGAAGGCACCGAAGCTCCTGATCTACGCCGCTAGCTCGCTGCAGTCCGGCGTCCCTTCACGGT |
| | | TCTCGGGATCGGGCTCAGGCACCGACTTCACCCTGACCATTAGCAGCCTGCAGCCGGAGGACTTCGCGACATACTACTGTCAGCAGTCATACTCCACCCCTCTGACCTTCGGCCAAGGGACCAAAGTGGAGATCAAG |
| SEQ ID NO: 74 | Full CAR amino acid sequence | EVQLLESGGGLVQPGGSLRLSCAASGFTFSSYAMSWVRQAPGKGLEWVSAISGSGGSTYYADSVKGRFTISRDNSKNTLYLQMNSLRAEDTAVYYCARREWWYDDWYLDYWGQGTLVTVSSGGGGSGGGGSGGGGSGGGGSDIQMTQSPSSLSASVGDRVTITCRASQSISSYLNWYQQKPGKAPKLLIYAASSLQSGVPSRFSGSGSGTDFTLTISSLQPEDFATYYCQQSYSTPLTFGQGTKVEIKTTTPAPRPPTPAPTIASQPLSLRPEACRPAAGGAVHTRGLDFACDIYIWAPLAGTCGVLLLSLVITLYCKRGRKKLLYIFKQPFMRPVQTTQEEDGCSCRFPEEEEGGCELRVKFSRSADAPAYQQGQNQLYNELNLGRREEYDVLDKRRGRDPEMGGKPRRKNPQEGLYNELQKDKMAEAYSEIGMKGERRRGKGHDGLYQGLSTATKDTYDALHMQALPPR |
| SEQ ID NO: 75 | Full CAR DNA sequence | GAAGTGCAGTTGCTGGAGTCAGGCGGAGGACTGGTGCAGCCCGGAGGATCGCTTCGCTTGAGCTGCGCAGCCTCAGGCTTTACCTTCTCCTCCTACGCCATGTCCTGGGTCAGACAGGCTCCCGGGAAGGGACTGGAATGGGTGTCCGCCATTAGCGGTTCCGGCGGAAGCACTTACTATGCCGACTCTGTGAAGGGCCGCTTCACTATCTCCCGGGACAACTCCAAGAACACCCTGTATCTCCAAATGAATTCCCTGAGGGCCGAAGATACCGCGGTGTACTACTGCGCTAGACGGGAGTGGTGGTACGACGATTGGTACCTGGACTACTGGGGACAGGGCACTCTCGTGACTGTGTCCTCCGGTGGTGGTGGATCGGGGGGTGGTGGTTCGGGCGGAGGAGGATCTGGAGGAGGAGGGTCGGACATTCAAATGACTCAGTCCCCGTCCTCCCTCTCCGCCTCCGTGGGAGATCGCGTCACGATCACGTGCAGGGCCAGCCAGAGCATCTCCAGCTACCTGAACTGGTACCAGCAGAAGCCAGGGAAGGCACCGAAGCTCCTGATCTACGCCGCTAGCTCGCTGCAGTCCGGCGTCCCTTCACGGTTCTCGGGATCGGGCTCAGGCACCGACTTCACCCTGACCATTAGCAGCCTGCAGCCGGAGGACTTCGCGACATACTACTGTCAGCAGTCATACTCCACCCCTCTGACCTTCGGCCAAGGGACCAAAGTGGAGATCAAGACCACTACCCCAGCACCGAGGCCACCCACCCCGGCTCCTACCATCGCCTCCCAGCCTCTGTCCCTGCGTCCGGAGGCATGTAGACCCGCAGCTGGTGGGGCCGTGCATACCCGGGGTCTTGACTTCGCCTGCGATATCTACATTTGGGCCCCTCTGGCTGGTACTTGCGGGGTCCTGCTGCTTTCACTCGTGATCACTCTTTACTGTAAGCGCGGTCGGAAGAAGCTGCTGTACATCTTTAAGCAACCCTTCATGAGGCCTGTGCAGACTACTCAAGAGGAGGACGGCTGTTCATGCCGGTTCCCAGAGGAGGAGGAAGGCGGCTGCGAACTGCGCGTGAAATTCAGCCGCAGCGCAGATGCTCCAGCCTACCAGCAGGGGCAGAACCAGCTCTACAACGAACTCAATCTTGGTCGGAGAGAGGAGTACGACGTGCTGGACAAGCGGAGAGGACGGGACCCAGAAATGGGCGGGAAGCCGCGCAGAAAGAATCCCCAAGAGGGCCTGTACAACGAGCTCCAAAAGGATAAGATGGCAGAAGCCTATAGCGAGATTGGTATGAAAGGGGAACGCAGAAGAGGCAAAGGCCACGACGGACTGTACCAGGGACTCAGCACCGCCACCAAGGACACCTATGACGCTCTTCACATGCAGGCCCTGCCGCCTCGG |
| R1G5 | | |
| SEQ ID NO: 44 | HCDR1 (Kabat) | SYAMS |
| SEQ ID NO: 45 | HCDR2 (Kabat) | AISGSGGSTYYADSVKG |
| SEQ ID NO: 76 | HCDR3 (Kabat) | REWWGESWLFDY |
| SEQ ID NO: 47 | HCDR1 (Chothia) | GFTFSSY |
| SEQ ID NO: 48 | HCDR2 (Chothia) | SGSGGS |
| SEQ ID NO: 76 | HCDR3 (Chothia) | REWWGESWLFDY |
| SEQ ID NO: 49 | HCDR1 (IMGT) | GFTFSSYA |
| SEQ ID NO: 50 | HCDR2 (IMGT) | ISGSGGST |
| SEQ ID NO: 77 | HCDR3 (IMGT) | ARREWWGESWLFDY |
| SEQ ID NO: 78 | VH | EVQLLESGGGLVQPGGSLRLSCAASGFTFSSYAMSWVRQAPGKGLEWVSAISGSGGSTYYADSVKGRFTISRDNSKNTLYLQMNSLRAEDTAVYYCARREWWGESWLFDYWGQGTLVTVSS |
| SEQ ID NO: 79 | DNA VH | GAAGTGCAGTTGCTGGAGTCAGGCGGAGGACTGGTGCAGCCCGGAGGATCGCTTCGCTTGAGCTGCGCAGCCTCAGGCTTTACCTTCTCCTCCTACGCCATGTCCTGGGTCAGACAGGCTCCCGGGAAGGGACTGGAATGGGTGTCCGCCATTAGCGGTTCCGGCGGAAGCACTTACTATGCCGACTCTGTGAAGGGCCGCTTCACTATCTCCCGGGACAACTCCAAGAACACCCTGTATCTCCAAATGAATTCCCTGAGGGCCGAAGATACCGCGGTGTACTACTGCGCTAGACGGGAGTGGTGGGGAGAAAGCTGGCTGTTCGACTACTGGGGACAGGGCACTCTCGTGACTGTGTCCTCC |
| SEQ ID NO: 54 | LCDR1 (Kabat) | RASQSISSYLN |
| SEQ ID NO: 55 | LCDR2 (Kabat) | AASSLQS |
| SEQ ID NO: 56 | LCDR3 (Kabat) | QQSYSTPLT |
| SEQ ID NO: 57 | LCDR1 (Chothia) | SQSISSY |
| SEQ ID NO: 58 | LCDR2 (Chothia) | AAS |
| SEQ ID NO: 59 | LCDR3 (Chothia) | SYSTPL |
| SEQ ID NO: 60 | LCDR1 (IMGT) | QSISSY |
| SEQ ID NO: 58 | LCDR2 (IMGT) | AAS |
| SEQ ID NO: 56 | LCDR3 (IMGT) | QQSYSTPLT |
| SEQ ID NO: 61 | VL | [sequence omitted] |
| SEQ ID NO: 62 | DNA VL | GACATTCAAATGACTCAGTCCCCGTCCTCCCTCTCCGCCTCCGTGGGAGATCGCGTCACGATCACGTGCAGGGCCAGCCAGAGCATCTCCAGCTACCTGAACTGGTACCAGCAGAAGCCAGGGAAGGCACCGAAGCTCCTGATCTACGCCGCTAGCTCGCTGCAGTCCGGCGTCCCTTCACGGTTCTCGGGATCGGGCTCAGGCACCGACTTCACCCTGACCATTAGCAGCCTGCAGCCGGAGGACTTCGCGACATACTACTGTCAGCAGTCATACTCCACCCCTCTGACCTTCGGCCAAGGGACCAAAGTGGAGATCAAG |
| SEQ ID NO: 63 | Linker | GGGGSGGGGSGGGGSGGGGS |
| SEQ ID NO: 80 | scFv (VH-linker-VL) | EVQLLESGGGLVQPGGSLRLSCAASGFTFSSYAMSWVRQAPGKGLEWVSAISGSGGSTYYADSVKGRFTISRDNSKNTLYLQMNSLRAEDTAVYYCARREWWGESWLFDYWGQGTLVTVSSGGGGSGGGGSGGGGSGGGGSDIQMTQSPSSLSASVGDRVTITCRASQSISSYLNWYQQKPGKAPKLLIYAASSLQSGVPSRFSGSGSGTDFTLTISSLQPEDFATYYCQQSYSTPLTFGQGTKVEIK |
| SEQ ID NO: 81 | DNA scFv | GAAGTGCAGTTGCTGGAGTCAGGCGGAGGACTGGTGCAGCCCGGAGGATCGCTTCGCTTGAGCTGCGCAGCCTCAGGCTTTACCTTCTCCTCCTACGCCATGTCCTGGGTCAGACAGGCTCCCGGGAAGGGACTGGAATGGGTGTCCGCCATTAGCGGTTCCGGCGGAAGCACTTACTATGCCGACTCTGTGAAGGGCCGCTTCACTATCTCCCGGGACAACTCCAAGAACACCCTGTATCTCCAAATGAATTCCCTGAGGGCCGAAGATACCGCGGTGTACTACTGCGCTAGACGGGAGTGGTGGGGAGAAAGCTGGCTGTTCGACTACTGGGGACAGGGCACTCTCGTGACTGTGTCCTCCGGTGGTGGTGGATCGGGGGGTGGTGGTTCGGGCGGAGGAGGATCTGGAGGAGGAGGGTCGGACATTCAAATGACTCAGTCCCCGTCCTCCCTCTCCGCCTCCGTGGGAGATCGCGTCACGATCACGTGCAGGGCCAGCCAGAGCATCTCCAGCTACCTGAACTGGTACCAGCAGAAGCCAGGGAAGGCACCGAAGCTCCTGATCTACGCCGCTAGCTCGCTGCAGTCCGGCGTCCCTTCACGGTTCTCGGGATCGGGCTCAGGCACCGACTTCACCCTGACCATTAGCAGCCTGCAGCCGGAGGACTTCGCGACATACTACTGTCAGCAGTCATACTCCACCCCTCTGACCTTCGGCCAAGGGACCAAAGTGGAGATCAAG |
| SEQ ID NO: 82 | Full CAR amino acid sequence | EVQLLESGGGLVQPGGSLRLSCAASGFTFSSYAMSWVRQAPGKGLEWVSAISGSGGSTYYADSVKGRFTISRDNSKNTLYLQMNSLRAEDTAVYYCARREWWGESWLFDYWGQGTLVTVSSGGGGSGGGGSGGGGSGGGGSDIQMTQSPSSLSASVGDRVTITCRASQSISSYLNWYQQKPGKAPKLLIYAASSLQSGVPSRFSGSGSGTDFTLTISSLQPEDFATYYCQQSYSTPLTFGQGTKVEIKTTTPAPRPPTPAPTIASQPLSLRPEACRPAAGGAVHTRGLDFACDIYIWAPLAGTCGVLLLSLVITLYCKRGRKKLLYIFKQPFMRPVQTTQEEDGCSCRFPEEEEGGCELRVKFSRSADAPAYQQGQNQLYNELNLGRREEYDVLDKRRGRDPEMGGKPRRKNPQEGLYNELQKDKMAEAYSEIGMKGERRRGKGHDGLYQGLSTATKDTYDALHMQALPPR |
| SEQ ID NO: 83 | Full CAR DNA sequence | GAAGTGCAGTTGCTGGAGTCAGGCGGAGGACTGGTGCAGCCCGGAGGATCGCTTCGCTTGAGCTGCGCAGCCTCAGGCTTTACCTTCTCCTCCTACGCCATGTCCTGGGTCAGACAGGCTCCCGGGAAGGGACTGGAATGGGTGTCCGCCATTAGCGGTTCCGGCGGAAGCACTTACTATGCCGACTCTGTGAAGGGCCGCTTCACTATCTCCCGGGACAACTCCAAGAACACCCTGTATCTCCAAATGAATTCCCTGAGGGCCGAAGATACCGCGGTGTACTACTGCGCTAGACGGGAGTGGTGGGGAGAAAGCTGGCTGTTCGACTACTGGGGACAGGGCACTCTCGTGACTGTGTCCTCCGGTGGTGGTGGATCGGGGGGTGGTGGTTCGGGCGGAGGAGGATCTGGAGGAGGAGGGTCGGACATTCAAATGACTCAGTCCCCGTCCTCCCTCTCCGCCTCCGTGGGAGATCGCGTCACGATCACGTGCAGGGCCAGCCAGAGCATCTCCAGCTACCTGAACTGGTACCAGCAGAAGCCAGGGAAGGCACCGAAGCTCCTGATCTACGCCGCTAGCTCGCTGCAGTCCGGCGTCCCTTCACGGTTCTCGGGATCGGGCTCAGGCACCGACTTCACCCTGACCATTAGCAGCCTGCAGCCGGAGGACTTCGCGACATACTACTGTCAGCAGTCATACTCCACCCCTCTGACCTTCGGCCAAGGGACCAAAGTGGAGATCAAGACCACTACCCCAGCACCGAGGCCACCCACCCCGGCTCCTACCATCGCCTCCCAGCCTCTGTCCCTGCGTCCGGAGGCATGTAGACCCGCAGCTGGTGGGGCCGTGCATACCCGGGGTCTTGACTTCGCCTGCGATATCTACATTTGGGCCCCTCTGGCTGGTACTTGCGGGGTCCTGCTGCTTTCACTCGTGATCACTCTTTACTGTAAGCGCGGTCGGAAGAAGCTGCTGTACATCTTTAAGCAACCCTTCATGAGGCCTGTGCAGACTACTCAAGAGGAGGACGGCTGTTCATGCCGGTTCCCAGAGGAGGAGGAAGGCGGCTGCGAACTGCGCGTGAAATTCAGCCGCAGCGCAGATGCTCCAGCCTACCAGCAGGGGCAGAACCAGCTCTACAACGAACTCAATCTTGGTCGGAGAGAGGAGTACGACGTGCTGGACAAGCGGAGAGGACGGGACCCAGAAATGGGCGGGAAGCCGCGCAGAAAGAATCCCCAAGAGGGCCTGTACAACGAGCTCCAAAAGGATAAGATGGCAGAAGCCTATAGCGAGATTGGTATGAAAGGGGAACGCAGAAGAGGCAAAGGCCACGACGGACTGTACCAGGGACTCAGCACCGCCACCAAGGACACCTATGACGCTCTTCACATGCAGGCCCTGCCGCCTCGG |

TABLE 4

Kabat CDRs of exemplary PALLAS-derived anti-BCMA molecules

| | | | | | | |
|---|---|---|---|---|---|---|
| Kabat | HCDR1 | HCDR2 | HCDR3 | LCDR1 | LCDR2 | LCDR3 |
| R1B6 | SYAMS (SEQ ID NO: 44) | AISGSGGSTY YADSVKG (SEQ ID NO: 45) | REWVPYDVS WYFDY (SEQ ID NO: 46) | RASQSISS YLN (SEQ ID NO: 54) | AASSL QS (SEQ ID NO: 55) | QQSYSTP LT (SEQ ID NO: 56) |
| R1F2 | SYAMS (SEQ ID NO: 44) | AISGSGGSTY YADSVKG (SEQ ID NO: 45) | REWWYDD WYLDY (SEQ ID NO: 68) | RASQSISS YLN (SEQ ID NO: 54) | AASSL QS (SEQ ID NO: 55) | QQSYSTP LT (SEQ ID NO: 56) |
| R1G5 | SYAMS (SEQ ID NO: 44) | AISGSGGSTY YADSVKG (SEQ ID NO: 45) | REWWGESW LFDY (SEQ ID NO: 76) | RASQSISS YLN (SEQ ID NO: 54) | AASSL QS (SEQ ID NO: 55) | QQSYSTP LT (SEQ ID NO: 56) |
| Consensus | SYAMS (SEQ ID NO: 44) | AISGSGGSTY YADSVKG (SEQ ID NO: 45) | REWX₁X₂X₃X ₄X₅X₆WX₇X₈D Y, wherein X₁ is absent or V; X₂ is absent or P; X₃ is W or Y; X₄ is G, Y, or D; X₅ is E, D, or V; X₆ is S or D; X₇ is L or Y; and X₈ is F or L (SEQ ID NO: 84) | RASQSISS YLN (SEQ ID NO: 54) | AASSL QS (SEQ ID NO: 55) | QQSYSTP LT (SEQ ID NO: 56) |

TABLE 5

Chothia CDRs of exemplary PALLAS-derived anti-BCMA molecules

| | | | | | | |
|---|---|---|---|---|---|---|
| Chothia | HCDR1 | HCDR2 | HCDR3 | LCDR1 | LCDR2 | LCDR3 |
| R1B6 | GFTFSSY (SEQ ID NO: 47) | SGSGGS (SEQ ID NO: 48) | REWVPYDVS WYFDY (SEQ ID NO: 46) | SQSISSY (SEQ ID NO: 57) | AAS (SEQ ID NO: 58) | SYSTPL (SEQ ID NO: 59) |
| R1F2 | GFTFSSY (SEQ ID NO: 47) | SGSGGS (SEQ ID NO: 48) | REWWYDD WYLDY (SEQ ID NO: 68) | SQSISSY (SEQ ID NO: 57) | AAS (SEQ ID NO: 58) | SYSTPL (SEQ ID NO: 59) |
| R1G5 | GFTFSSY (SEQ ID NO: 47) | SGSGGS (SEQ ID NO: 48) | REWWGESW LFDY (SEQ ID NO: 76) | SQSISSY (SEQ ID NO: 57) | AAS (SEQ ID NO: 58) | SYSTPL (SEQ ID NO: 59) |
| Consensus | GFTFSSY (SEQ ID NO: 47) | SGSGGS (SEQ ID NO: 48) | REWX₁X₂X₃X ₄X₅X₆WX₇X₈D Y, wherein X₁ is absent or V; X₂ is absent or P; X₃ is W or Y; X₄ is G, Y, or D; X₅ is E, D, or V; X₆ is S or D; X₇ is L or Y; and X₈ is F or L (SEQ ID NO: 84) | SQSISSY (SEQ ID NO: 57) | AAS (SEQ ID NO: 58) | SYSTPL (SEQ ID NO: 59) |

TABLE 6

IMGT CDRs of exemplary PALLAS-derived anti-BCMA molecules

| | | | | | | |
|---|---|---|---|---|---|---|
| IMGT | HCDR1 | HCDR2 | HCDR3 | LCDR1 | LCDR2 | LCDR3 |
| R1B6 | GFTFSSYA (SEQ ID NO: 49) | ISGSGGST (SEQ ID NO: 50) | ARREWVPY DVSWYFDY (SEQ ID NO: 51) | QSISSY (SEQ ID NO: 60) | AAS (SEQ ID NO: 58) | QQSYSTP LT (SEQ ID NO: 56) |
| R1F2 | GFTFSSYA (SEQ ID NO: 49) | ISGSGGST (SEQ ID NO: 50) | ARREWWYD DWYLDY (SEQ ID NO: 69) | QSISSY (SEQ ID NO: 60) | AAS (SEQ ID NO: 58) | QQSYSTP LT (SEQ ID NO: 56) |
| R1G5 | GFTFSSYA (SEQ ID NO: 49) | ISGSGGST (SEQ ID NO: 50) | ARREWWGE SWLFDY (SEQ ID NO: 77) | QSISSY (SEQ ID NO: 60) | AAS (SEQ ID NO: 58) | QQSYSTP LT (SEQ ID NO: 56) |
| Consensus | GFTFSSYA (SEQ ID NO: 49) | ISGSGGST (SEQ ID NO: 50) | ARREWX₁X₂ X₃X₄X₅X₆WX₇ X_{g}DY, wherein X₁ is absent or V; X₂ is absent or P; X₃ is W or Y; X₄ is G, Y, or D; X₅ is E, D, or V; X₆ is S or D; X₇ is L or Y; and X₈ is F or L (SEQ ID NO: 85) | QSISSY (SEQ ID NO: 60) | AAS (SEQ ID NO: 58) | QQSYSTP LT (SEQ ID NO: 56) |

TABLE 7

Amino acid and nucleic acid sequences of exemplary B cell-derived anti-BCMA molecules

| SEQ ID NO | Name/ Description | Sequence |
|---|---|---|
| PI61 | | |
| SEQ ID NO: 86 | HCDR1 (Kabat) | SYGMH |
| SEQ ID NO: 87 | HCDR2 (Kabat) | VISYDGSNKYYADSVKG |
| SEQ ID NO: 88 | HCDR3 (Kabat) | SGYALHDDYYGLDV |
| SEQ ID NO: 47 | HCDR1 (Chothia) | GFTFSSY |
| SEQ ID NO: 89 | HCDR2 (Chothia) | SYDGSN |
| SEQ ID NO: 88 | HCDR3 (Chothia) | SGYALHDDYYGLDV |
| SEQ ID NO: 90 | HCDR1 (IMGT) | GFTFSSYG |
| SEQ ID NO: 91 | HCDR2 (IMGT) | ISYDGSNK |
| SEQ ID NO: 92 | HCDR3 (IMGT) | GGSGYALHDDYYGLDV |
| SEQ ID NO: 93 | VH | QVQLQESGGGVVQPGRSLRLSCAASGFTFSSYGMHWVRQAPGKGLEWVAVISYDGSNKYYADSVKGRFTISRDNSKNTLYLQMNSLRAEDTAVYYCGGSGYALHDDYYGLDVWGQGTLVTVSS |
| SEQ ID NO: 94 | DNA VH | CAAGTGCAGCTGCAGGAATCCGGTGGCGGAGTCGTGCAGCCTGGAAGGAGCCTGAGACTCTCATGCGCCGCGTCAGGGTTCACCTTTTCCTCCTACGGGATGCATTGGGTCAGACAGGCCCCCGGAAAGGGACTCGAATGGGTGGCTGTGATCAGCTACGACGGCTCCAACAAGTACTACGCCGACTCCGTGAAAGGCCGGTTCACTATCTCCCGGGACAACTCCAAGAACACGCTGTATCTGCAAATGAATTCACTGCGCGCGGAGGATACCGCTGTGTACTACTGCGGTGGCTCCGGTTACGCCCTGCACGATGACTATTACGGCCTTGACGTCTGGGGCCAGGGAACCCTCGTGACTGTGTCCAGC |
| SEQ ID NO: 95 | LCDR1 (Kabat) | TGTSSDVGGYNYVS |
| SEQ ID NO: 96 | LCDR2 (Kabat) | DVSNRPS |
| SEQ ID NO: 97 | LCDR3 (Kabat) | SSYTSSSTLYV |
| SEQ ID NO: 98 | LCDR1 (Chothia) | TSSDVGGYNY |
| SEQ ID NO: 99 | LCDR2 (Chothia) | DVS |
| SEQ ID NO: 100 | LCDR3 (Chothia) | YTSSSTLY |
| SEQ ID NO: 101 | LCDR1 (IMGT) | SSDVGGYNY |
| SEQ ID NO: 99 | LCDR2 (IMGT) | DVS |
| SEQ ID NO: 97 | LCDR3 (IMGT) | SSYTSSSTLYV |
| SEQ ID NO: 102 | VL | QSALTQPASVSGSPGQSITISCTGTSSDVGGYNYVSWYQQHPGKAPKLMIYDVSNRPSGVSNRFSGSKSGNTASLTISGLQAEDEADYYCSSYTSSSTLYVFGSGTKVTVL |
| SEQ ID NO: 103 | DNA VL | CAGAGCGCACTGACTCAGCCGGCATCCGTGTCCGGTAGCCCCGGACAGTCGATTACCATCTCCTGTACCGGCACCTCCTCCGACGTGGGAGGGTACAACTACGTGTCGTGGTACCAGCAGCACCCAGGAAAGGCCCCTAAGTTGATGATCTACGATGTGTCAAACCGCCCGTCTGGAGTCTCCAACCGGTTCTCCGGCTCCAAGTCCGGCAACACCGCCAGCCTGACCATTAGCGGGCTGCAAGCCGAGGATGAGGCCGACTACTACTGCTCGAGCTACACATCCTCGAGCACCCTCTACGTGTTCGGCTCGGGGACTAAGGTCACCGTGCTG |
| SEQ ID NO: 104 | Linker | GGGGSGGGGSGGGGS |
| SEQ ID NO: 105 | scFv (VH-linker-VL) | QVQLQESGGGVVQPGRSLRLSCAASGFTFSSYGMHWVRQAPGKGLEWVAVISYDGSNKYYADSVKGRFTISRDNSKNTLYLQMNSLRAEDTAVYYCGGSGYALHDDYYGLDVWGQGTLVTVSSGGGGSGGGGSGGGGSQSALTQPASVSGSPGQSITISCTGTSSDVGGYNYVSWYQQHPGKAPKLMIYDVSNRPSGVSNRFSGSKSGNTASLTISGLQAEDEADYYCSSYTSSSTLYVFGSGTKVTVL |
| SEQ ID NO: 106 | DNA scFv | CAAGTGCAGCTGCAGGAATCCGGTGGCGGAGTCGTGCAGCCTGGAAGGAGCCTGAGACTCTCATGCGCCGCGTCAGGGTTCACCTTTTCCTCCTACGGGATGCATTGGGTCAGACAGGCCCCCGGAAAGGGACTCGAATGGGTGGCTGTGATCAGCTACGACGGCTCCAACAAGTACTACGCCGACTCCGTGAAAGGCCGGTTCACTATCTCCCGGGACAACTCCAAGAACACGCTGTATCTGCAAATGAATTCACTGCGCGCGGAGGATACCGCTGTGTACTACTGCGGTGGCTCCGGTTACGCCCTGCACGATGACTATTACGGCCTTGACGTCTGGGGCCAGGGAACCCTCGTGACTGTGTCCAGCGGTGGAGGAGGTTCGGGCGGAGGAGGATCAGGAGGGGGTGGATCGCAGAGCGCACTGACTCAGCCGGCATCCGTGTCCGGTAGCCCCGGACAGTCGATTACCATCTCCTGTACCGGCACCTCCTCCGACGTGGGAGGGTACAACTACGTGTCGTGGTACCAGCAGCACCCAGGAAAGGCCCCTAAGTTGATGATCTACGATGTGTCAAACCGCCCGTCTGGAGTCTCCAACCGGTTCTCCGGCTCCAAGTCCGGCAACACCGCCAGCCTGACCATTAGCGGGCTGCAAGCCGAGGATGAGGCCGACTACTACTGCTCGAGCTACACATCCTCGAGCACCCTCTACGTGTTCGGCTCGGGGACTAAGGTCACCGTGCTG |
| SEQ ID NO: 107 | Full CAR amino acid sequence | QVQLQESGGGVVQPGRSLRLSCAASGFTFSSYGMHWVRQAPGKGLEWVAVISYDGSNKYYADSVKGRFTISRDNSKNTLYLQMNSLRAEDTAVYYCGGSGYALHDDYYGLDVWGQGTLVTVSSGGGGSGGGGSGGGGSQSALTQPASVSGSPGQSITISCTGTSSDVGGYNYVSWYQQHPGKAPKLMIYDVSNRPSGVSNRFSGSKSGNTASLTISGLQAEDEADYYCSSYTSSSTLYVFGSGTKVTVLTTTPAPRPPTPAPTIASQPLSLRPEACRPAAGGAVHTRGLDFACDIYIWAPLAGTCGVLLLSLVITLYCKRGRKKLLYIFKQPFMRPVQTTQEEDGCSCRFPEEEEGGCELRVKFSRSADAPAYQQGQNQLYNELNLGRREEYDVLDKRRGRDPEMGGKPRRKNPQEGLYNELQKDKMAEAYSEIGMKGERRRGKGHDGLYQGLSTATKDTYDALHMQALPPR |
| SEQ ID NO: 108 | Full CAR DNA sequence | CAAGTGCAGCTGCAGGAATCCGGTGGCGGAGTCGTGCAGCCTGGAAGGAGCCTGAGACTCTCATGCGCCGCGTCAGGGTTCACCTTTTCCTCCTACGGGATGCATTGGGTCAGACAGGCCCCCGGAAAGGGACTCGAATGGGTGGCTGTGATCAGCTACGACGGCTCCAACAAGTACTACGCCGACTCCGTGAAAGGCCGGTTCACTATCTCCCGGGACAACTCCAAGAACACGCTGTATCTGCAAATGAATTCACTGCGCGCGGAGGATACCGCTGTGTACTACTGCGGTGGCTCCGGTTACGCCCTGCACGATGACTATTACGGCCTTGACGTCTGGGGCCAGGGAACCCTCGTGACTGTGTCCAGCGGTGGAGGAGGTTCGGGCGGAGGAGGATCAGGAGGGGGTGGATCGCAGAGCGCACTGACTCAGCCGGCATCCGTGTCCGGTAGCCCCGGACAGTCGATTACCATCTCCTGTACCGGCACCTCCTCCGACGTGGGAGGGTACAACTACGTGTCGTGGTACCAGCAGCACCCAGGAAAGGCCCCTAAGTTGATGATCTACGATGTGTCAAACCGCCCGTCTGGAGTCTCCAACCGGTTCTCCGGCTCCAAGTCCGGCAACACCGCCAGCCTGACCATTAGCGGGCTGCAAGCCGAGGATGAGGCCGACTACTACTGCTCGAGCTACACATCCTCGAGCACCCTCTACGTGTTCGGCTCGGGGACTAAGGTCACCGTGCTGACCACTACCCCAGCACCGAGGCCACCCACCCCGGCTCCTACCATCGCCTCCCAGCCTCTGTCCCTGCGTCCGGAGGCATGTAGACCCGCAGCTGGTGGGGCCGTGCATACCCGGGGTCTTGACTTCGCCTGCGATATCTACATTTGGGCCCCTCTGGCTGGTACTTGCGGGGTCCTGCTGCTTTCACTCGTGATCACTCTTTACTGTAAGCGCGGTCGGAAGAAGCTGCTGTACATCTTTAAGCAACCCTTCATGAGGCCTGTGCAGACTACTCAAGAGGAGGACGGCTGTTCATGCCGGTTCCCAGAGGAGGAGGAAGGCGGCTGCGAACTGCGCGTGAAATTCAGCCGCAGCGCAGATGCTCCAGCCTACCAGCAGGGGCAGAACCAGCTCTACAACGAACTCAATCTTGGTCGGAGAGAGGAGTACGACGTGCTGGACAAGCGGAGAGGACGGGACCCAGAAATGGGCGGGAAGCCGCGCAGAAAGAATCCCCAAGAGGGCCTGTACAACGAGCTCCAAAAGGATAAGATGGCAGAAGCCTATAGCGAGATTGGTATGAAAGGGGAACGCAGAAGAGGCAAAGGCCACGACGGACTGTACCAGGGACTCAGCACCGCCACCAAGGACACCTATGACGCTCTTCACATGCAGGCCCTGCCGCCTCGG |
| B61-02 | | |
| SEQ ID NO: 86 | HCDR1 (Kabat) | SYGMH |
| SEQ ID NO: 109 | HCDR2 (Kabat) | VISYKGSNKYYADSVKG |
| SEQ ID NO: 88 | HCDR3 (Kabat) | SGYALHDDYYGLDV |
| SEQ ID NO: 47 | HCDR1 (Chothia) | GFTFSSY |
| SEQ ID NO: 110 | HCDR2 (Chothia) | SYKGSN |
| SEQ ID NO: 88 | HCDR3 (Chothia) | SGYALHDDYYGLDV |
| SEQ ID NO: 90 | HCDR1 (IMGT) | GFTFSSYG |
| SEQ ID NO: 111 | HCDR2 (IMGT) | ISYKGSNK |
| SEQ ID NO: 92 | HCDR3 (IMGT) | GGSGYALHDDYYGLDV |
| SEQ ID NO: 112 | VH | QVQLVESGGGVVQPGRSLRLSCAASGFTFSSYGMHWVRQAPGKGLEWVAVISYKGSNKYYADSVKGRFTISRDNSKNTLYLQMNSLRAEDTAVYYCGGSGYALHDDYYGLDVWGQGTLVTVSS |
| SEQ ID NO: 113 | DNA VH | CAAGTGCAGCTTGTCGAATCGGGAGGCGGAGTGGTGCAGCCTGGACGATCGCTCCGGCTCTCATGTGCCGCGAGCGGATTCACCTTCTCGAGCTACGGCATGCACTGGGTCAGACAAGCCCCAGGAAAGGGCCTGGAATGGGTGGCTGTCATCTCGTACAAGGGCTCAAACAAGTACTACGCCGACTCCGTGAAGGGCCGGTTCACCATCTCCCGCGATAACTCCAAGAATACCCTCTATCTGCAAATGAACAGCCTGAGGGCCGAGGATACTGCAGTGTACTACTGCGGGGGTTCAGGCTACGCGCTGCACGACGACTACTACGGATTGGACGTCTGGGGCCAAGGAACTCTTGTGACCGTGTCCTCT |
| SEQ ID NO: 95 | LCDR1 (Kabat) | TGTSSDVGGYNYVS |
| SEQ ID NO: 114 | LCDR2 (Kabat) | EVSNRLR |
| SEQ ID NO: 115 | LCDR3 (Kabat) | SSYTSSSALYV |
| SEQ ID NO: 98 | LCDR1 (Chothia) | TSSDVGGYNY |
| SEQ ID NO: 116 | LCDR2 (Chothia) | EVS |
| SEQ ID NO: 117 | LCDR3 (Chothia) | YTSSSALY |
| SEQ ID NO: 101 | LCDR1 (IMGT) | SSDVGGYNY |
| SEQ ID NO: 116 | LCDR2 (IMGT) | EVS |
| SEQ ID NO: 115 | LCDR3 (IMGT) | SSYTSSSALYV |
| SEQ ID NO: 118 | VL | QSALTQPASVSGSPGQSITISCTGTSSDVGGYNYVSWYQQHPGKAPKLMIYEVSNRLRGVSNRFSGSKSGNTASLTISGLQAEDEADYYCSSYTSSSALYVFGSGTKVTVL |
| SEQ ID NO: 119 | DNA VL | CAGAGCGCGCTGACTCAGCCTGCCTCCGTGAGCGGTTCGCCGGGACAGTCCATTACCATTTCGTGCACCGGGACCTCCTCCGACGTGGGAGGCTACAACTACGTGTCCTGGTACCAGCAGCATCCCGGAAAGGCCCCGAAGCTGATGATCTACGAAGTGTCGAACAGACTGCGGGGAGTCTCCAACCGCTTTTCCGGGTCCAAGTCCGGCAACACCGCCAGCCTGACCATCAGCGGGCTCCAGGCAGAAGATGAGGCTGACTATTACTGCTCCTCCTACACGTCAAGCTCCGCCCTCTACGTGTTCGGGTCCGGGACCAAAGTCACTGTGCTG |
| SEQ ID NO: 63 | Linker | GGGGSGGGGSGGGGSGGGGS |
| SEQ ID NO: 120 | scFv (VH-linker-VL) | QVQLVESGGGVVQPGRSLRLSCAASGFTFSSYGMHWVRQAPGKGLEWVAVISYKGSNKYYADSVKGRFTISRDNSKNTLYLQMNSLRAEDTAVYYCGGSGYALHDDYYGLDVWGQGTLVTVSSGGGGSGGGGSGGGGSGGGGSQSALTQPASVSGSPGQSITISCTGTSSDVGGYNYVSWYQQHPGKAPKLMIYEVSNRLRGVSNRFSGSKSGNTASLTISGLQAEDEADYYCSSYTSSSALYVFGSGTKVTVL |
| SEQ ID NO: 121 | DNA scFv | CAAGTGCAGCTTGTCGAATCGGGAGGCGGAGTGGTGCAGCCTGGACGATCGCTCCGGCTCTCATGTGCCGCGAGCGGATTCACCTTCTCGAGCTACGGCATGCACTGGGTCAGACAAGCCCCAGGAAAGGGCCTGGAATGGGTGGCTGTCATCTCGTACAAGGGCTCAAACAAGTACTACGCCGACTCCGTGAAGGGCCGGTTCACCATCTCCCGCGATAACTCCAAGAATACCCTCTATCTGCAAATGAACAGCCTGAGGGCCGAGGATACTGCAGTGTACTACTGCGGGGGTTCAGGCTACGCGCTGCACGACGACTACTACGGATTGGACGTCTGGGGCCAAGGAACTCTTGTGACCGTGTCCTCTGGTGGAGGCGGATCAGGGGGTGGCGGATCTGGGGGTGGTGGTTCCGGGGGAGGAGGATCGCAGAGCGCGCTGACTCAGCCTGCCTCCGTGAGCGGTTCGCCGGGACAGTCCATTACCATTTCGTGCACCGGGACCTCCTCCGACGTGGGAGGCTACAACTACGTGTCCTGGTACCAGCAGCATCCCGGAAAGGCCCCGAAGCTGATGATCTACGAAGTGTCGAACAGACTGCGGGGAGTCTCCAACCGCTTTTCCGGGTCCAAGTCCGGCAACACCGCCAGCCTGACCATCAGCGGGCTCCAGGCAGAAGATGAGGCTGACTATTACTGCTCCTCCTACACGTCAAGCTCCGCCCTCTACGTGTTCGGGTCCGGGACCAAAGTCACTGTGCTG |
| SEQ ID NO: 122 | Full CAR amino acid sequence | QVQLVESGGGVVQPGRSLRLSCAASGFTFSSYGMHWVRQAPGKGLEWVAVISYKGSNKYYADSVKGRFTISRDNSKNTLYLQMNSLRAEDTAVYYCGGSGYALHDDYYGLDVWGQGTLVTVSSGGGGSGGGGSGGGGSGGGGSQSALTQPASVSGSPGQSITISCTGTSSDVGGYNYVSWYQQHPGKAPKLMIYEVSNRLRGVSNRFSGSKSGNTASLTISGLQAEDEADYYCSSYTSSSALYVFGSGTKVTVLTTTPAPRPPTPAPTIASQPLSLRPEACRPAAGGAVHTRGLDFACDIYIWAPLAGTCGVLLLSLVITLYCKRGRKKLLYIFKQPFMRPVQTTQEEDGCSCRFPEEEEGGCELRVKFSRSADAPAYQQGQNQLYNELNLGRREEYDVLDKRRGRDPEMGGKPRRKNPQEGLYNELQKDKMAEAYSEIGMKGERRRGKGHDGLYQGLSTATKDTYDALHMQALPPR |
| SEQ ID NO: 123 | Full CAR DNA sequence | CAAGTGCAGCTTGTCGAATCGGGAGGCGGAGTGGTGCAGCCTGGACGATCGCTCCGGCTCTCATGTGCCGCGAGCGGATTCACCTTCTCGAGCTACGGCATGCACTGGGTCAGACAAGCCCCAGGAAAGGGCCTGGAATGGGTGGCTGTCATCTCGTACAAGGGCTCAAACAAGTACTACGCCGACTCCGTGAAGGGCCGGTTCACCATCTCCCGCGATAACTCCAAGAATACCCTCTATCTGCAAATGAACAGCCTGAGGGCCGAGGATACTGCAGTGTACTACTGCGGGGGTTCAGGCTACGCGCTGCACGACGACTACTACGGATTGGACGTCTGGGGCCAAGGAACTCTTGTGACCGTGTCCTCTGGTGGAGGCGGATCAGGGGGTGGCGGATCTGGGGGTGGTGGTTCCGGGGGAGGAGGATCGCAGAGCGCGCTGACTCAGCCTGCCTCCGTGAGCGGTTCGCCGGGACAGTCCATTACCATTTCGTGCACCGGGACCTCCTCCGACGTGGGAGGCTACAACTACGTGTCCTGGTACCAGCAGCATCCCGGAAAGGCCCCGAAGCTGATGATCTACGAAGTGTCGAACAGACTGCGGGGAGTCTCCAACCGCTTTTCCGGGTCCAAGTCCGGCAACACCGCCAGCCTGACCATCAGCGGGCTCCAGGCAGAAGATGAGGCTGACTATTACTGCTCCTCCTACACGTCAAGCTCCGCCCTCTACGTGTTCGGGTCCGGGACCAAAGTCACTGTGCTGACCACTACCCCAGCACCGAGGCCACCCACCCCGGCTCCTACCATCGCCTCCCAGCCTCTGTCCCTGCGTCCGGAGGCATGTAGACCCGCAGCTGGTGGGGCCGTGCATACCCGGGGTCTTGACTTCGCCTGCGATATCTACATTTGGGCCCCTCTGGCTGGTACTTGCGGGGTCCTGCTGCTTTCACTCGTGATCACTCTTTACTGTAAGCGCGGTCGGAAGAAGCTGCTGTACATCTTTAAGCAACCCTTCATGAGGCCTGTGCAGACTACTCAAGAGGAGGACGGCTGTTCATGCCGGTTCCCAGAGGAGGAGGAAGGCGGCTGCGAACTGCGCGTGAAATTCAGCCGCAGCGCAGATGCTCCAGCCTACCAGCAGGGGCAGAACCAGCTCTACAACGAACTCAATCTTGGTCGGAGAGAGGAGTACGACGTGCTGGACAAGCGGAGAGGACGGGACCCAGAAATGGGCGGGAAGCCGCGCAGAAAGAATCCCCAAGAGGGCCTGTACAACGAGCTCCAAAAGGATAAGATGGCAGAAGCCTATAGCGAGATTGGTATGAAAGGGGAACGCAGAAGAGGCAAAGGCCACGACGGACTGTACCAGGGACTCAGCACCGCCACCAAGGACACCTATGACGCTCTTCACATGCAGGCCCTGCCGCCTCGG |
| B61-10 | | |
| SEQ ID NO: 86 | HCDR1 (Kabat) | SYGMH |
| SEQ ID NO: 109 | HCDR2 (Kabat) | VISYKGSNKYYADSVKG |
| SEQ ID NO: 88 | HCDR3 (Kabat) | SGYALHDDYYGLDV |
| SEQ ID NO: 47 | HCDR1 (Chothia) | GFTFSSY |
| SEQ ID NO: 110 | HCDR2 (Chothia) | SYKGSN |
| SEQ ID NO: 88 | HCDR3 (Chothia) | SGYALHDDYYGLDV |
| SEQ ID NO: 90 | HCDR1 (IMGT) | GFTFSSYG |
| SEQ ID NO: 111 | HCDR2 (IMGT) | ISYKGSNK |
| SEQ ID NO: 92 | HCDR3 (IMGT) | GGSGYALHDDYYGLDV |
| SEQ ID NO: 112 | VH | QVQLVESGGGVVQPGRSLRLSCAASGFTFSSYGMHWVRQAPGKGLEWVAVISYKGSNKYYADSVKGRFTISRDNSKNTLYLQMNSLRAEDTAVYYCGGSGYALHDDYYGLDVWGQGTLVTVSS |
| SEQ ID NO: 113 | DNA VH | CAAGTGCAGCTTGTCGAATCGGGAGGCGGAGTGGTGCAGCCTGGACGATCGCTCCGGCTCTCATGTGCCGCGAGCGGATTCACCTTCTCGAGCTACGGCATGCACTGGGTCAGACAAGCCCCAGGAAAGGGCCTGGAATGGGTGGCTGTCATCTCGTACAAGGGCTCAAACAAGTACTACGCCGACTCCGTGAAGGGCCGGTTCACCATCTCCCGCGATAACTCCAAGAATACCCTCTATCTGCAAATGAACAGCCTGAGGGCCGAGGATACTGCAGTGTACTACTGCGGGGGTTCAGGCTACGCGCTGCACGACGACTACTACGGATTGGACGTCTGGGGCCAAGGAACTCTTGTGACCGTGTCCTCT |
| SEQ ID NO: 95 | LCDR1 (Kabat) | TGTSSDVGGYNYVS |
| SEQ ID NO: 114 | LCDR2 (Kabat) | EVSNRLR |
| SEQ ID NO: 97 | LCDR3 (Kabat) | SSYTSSSTLYV |
| SEQ ID NO: 98 | LCDR1 (Chothia) | TSSDVGGYNY |
| SEQ ID NO: 116 | LCDR2 (Chothia) | EVS |
| SEQ ID NO: 100 | LCDR3 (Chothia) | YTSSSTLY |
| SEQ ID NO: 101 | LCDR1 (IMGT) | SSDVGGYNY |
| SEQ ID NO: 116 | LCDR2 (IMGT) | EVS |
| SEQ ID NO: 97 | LCDR3 (IMGT) | SSYTSSSTLYV |
| SEQ ID NO: 124 | VL | QSALTQPASVSGSPGQSITISCTGTSSDVGGYNYVSWYQQHPGKAPKLMIYEVSNRLRGVSNRFSGSKSGNTASLTISGLQAEDEADYYCSSYTSSSTLYVFGSGTKVTVL |
| SEQ ID NO: 125 | DNA VL | CAGAGCGCGCTGACTCAGCCTGCCTCCGTGAGCGGTTCGCCGGGACAGTCCATTACCATTTCGTGCACCGGGACCTCCTCCGACGTGGGAGGCTACAACTACGTGTCCTGGTACCAGCAGCATCCCGGAAAGGCCCCGAAGCTGATGATCTACGAAGTGTCGAACAGACTGCGGGGAGTCTCCAACCGCTTTTCCGGGTCCAAGTCCGGCAACACCGCCAGCCTGACCATCAGCGGGCTCCAGGCAGAAGATGAGGCTGACTATTACTGCTCCTCCTACACGTCAAGCTCCACCCTCTACGTGTTCGGGTCCGGGACCAAAGTCACTGTGCTG |
| SEQ ID NO: 63 | Linker | GGGGSGGGGSGGGGSGGGGS |
| SEQ ID NO: 126 | scFv (VH-linker-VL) | QVQLVESGGGVVQPGRSLRLSCAASGFTFSSYGMHWVRQAPGKGLEWVAVISYKGSNKYYADSVKGRFTISRDNSKNTLYLQMNSLRAEDTAVYYCGGSGYALHDDYYGLDVWGQGTLVTVSSGGGGSGGGGSGGGGSGGGGSQSALTQPASVSGSPGQSITISCTGTSSDVGGYNYVSWYQQHPGKAPKLMIYEVSNRLRGVSNRFSGSKSGNTASLTISGLQAEDEADYYCSSYTSSSTLYVFGSGTKVTVL |
| SEQ ID NO: 127 | DNA scFv | CAAGTGCAGCTTGTCGAATCGGGAGGCGGAGTGGTGCAGCCTGGACGATCGCTCCGGCTCTCATGTGCCGCGAGCGGATTCACCTTCTCGAGCTACGGCATGCACTGGGTCAGACAAGCCCCAGGAAAGGGCCTGGAATGGGTGGCTGTCATCTCGTACAAGGGCTCAAACAAGTACTACGCCGACTCCGTGAAGGGCCGGTTCACCATCTCCCGCGATAACTCCAAGAATACCCTCTATCTGCAAATGAACAGCCTGAGGGCCGAGGATACTGCAGTGTACTACTGCGGGGGTTCAGGCTACGCGCTGCACGACGACTACTACGGATTGGACGTCTGGGGCCAAGGAACTCTTGTGACCGTGTCCTCTGGTGGAGGCGGATCAGGGGGTGGCGGATCTGGGGGTGGTGGTTCCGGGGGAGGAGGATCGCAGAGCGCGCTGACTCAGCCTGCCTCCGTGAGCGGTTCGCCGGGACAGTCCATTACCATTTCGTGCACCGGGACCTCCTCCGACGTGGGAGGCTACAACTACGTGTCCTGGTACCAGCAGCATCCCGGAAAGGCCCCGAAGCTGATGATCTACGAAGTGTCGAACAGACTGCGGGGAGTCTCCAACCGCTTTTCCGGGTCCAAGTCCGGCAACACCGCCAGCCTGACCATCAGCGGGCTCCAGGCAGAAGATGAGGCTGACTATTACTGCTCCTCCTACACGTCAAGCTCCACCCTCTACGTGTTCGGGTCCGGGACCAAAGTCACTGTGCTG |
| SEQ ID NO: 128 | Full CAR amino acid sequence | QVQLVESGGGVVQPGRSLRLSCAASGFTFSSYGMHWVRQAPGKGLEWVAVISYKGSNKYYADSVKGRFTISRDNSKNTLYLQMNSLRAEDTAVYYCGGSGYALHDDYYGLDVWGQGTLVTVSSGGGGSGGGGSGGGGSGGGGSQSALTQPASVSGSPGQSITISCTGTSSDVGGYNYVSWYQQHPGKAPKLMIYEVSNRLRGVSNRFSGSKSGNTASLTISGLQAEDEADYYCSSYTSSSTLYVFGSGTKVTVLTTTPAPRPPTPAPTIASQPLSLRPEACRPAAGGAVHTRGLDFACDIYIWAPLAGTCGVLLLSLVITLYCKRGRKKLLYIFKQPFMRPVQTTQEEDGCSCRFPEEEEGGCELRVKFSRSADAPAYQQGQNQLYNELNLGRREEYDVLDKRRGRDPEMGGKPRRKNPQEGLYNELQKDKMAEAYSEIGMKGERRRGKGHDGLYQGLSTATKDTYDALHMQALPPR |
| SEQ ID NO: 129 | Full CAR DNA sequence | CAAGTGCAGCTTGTCGAATCGGGAGGCGGAGTGGTGCAGCCTGGACGATCGCTCCGGCTCTCATGTGCCGCGAGCGGATTCACCTTCTCGAGCTACGGCATGCACTGGGTCAGACAAGCCCCAGGAAAGGGCCTGGAATGGGTGGCTGTCATCTCGTACAAGGGCTCAAACAAGTACTACGCCGACTCCGTGAAGGGCCGGTTCACCATCTCCCGCGATAACTCCAAGAATACCCTCTATCTGCAAATGAACAGCCTGAGGGCCGAGGATACTGCAGTGTACTACTGCGGGGGTTCAGGCTACGCGCTGCACGACGACTACTACGGATTGGACGTCTGGGGCCAAGGAACTCTTGTGACCGTGTCCTCTGGTGGAGGCGGATCAGGGGGTGGCGGATCTGGGGGTGGTGGTTCCGGGGGAGGAGGATCGCAGAGCGCGCTGACTCAGCCTGCCTCCGTGAGCGGTTCGCCGGGACAGTCCATTACCATTTCGTGCACCGGGACCTCCTCCGACGTGGGAGGCTACAACTACGTGTCCTGGTACCAGCAGCATCCCGGAAAGGCCCCGAAGCTGATGATCTACGAAGTGTCGAACAGACTGCGGGGAGTCTCCAACCGCTTTTCCGGGTCCAAGTCCGGCAACACCGCCAGCCTGACCATCAGCGGGCTCCAGGCAGAAGATGAGGCTGACTATTACTGCTCCTCCTACACGTCAAGCTCCACCCTCTACGTGTTCGGGTCCGGGACCAAAGTCACTGTGCTGACCACTACCCCAGCACCGAGGCCACCCACCCCGGCTCCTACCATCGCCTCCCAGCCTCTGTCCCTGCGTCCGGAGGCATGTAGACCCGCAGCTGGTGGGGCCGTGCATACCCGGGGTCTTGACTTCGCCTGCGATATCTACATTTGGGCCCCTCTGGCTGGTACTTGCGGGGTCCTGCTGCTTTCACTCGTGATCACTCTTTACTGTAAGCGCGGTCGGAAGAAGCTGCTGTACATCTTTAAGCAACCCTTCATGAGGCCTGTGCAGACTACTCAAGAGGAGGACGGCTGTTCATGCCGGTTCCCAGAGGAGGAGGAAGGCGGCTGCGAACTGCGCGTGAAATTCAGCCGCAGCGCAGATGCTCCAGCCTACCAGCAGGGGCAGAACCAGCTCTACAACGAACTCAATCTTGGTCGGAGAGAGGAGTACGACGTGCTGGACAAGCGGAGAGGACGGGACCCAGAAATGGGCGGGAAGCCGCGCAGAAAGAATCCCCAAGAGGGCCTGTACAACGAGCTCCAAAAGGATAAGATGGCAGAAGCCTATAGCGAGATTGGTATGAAAGGGGAACGCAGAAGAGGCAAAGGCCACGACGGACTGTACCAGGGACTCAGCACCGCCACCAAGGACACCTATGACGCTCTTCACATGCAGGCCCTGCCGCCTCGG |

TABLE 8

Kabat CDRs of exemplary B cell-derived anti-BCMA molecules

| | | | | | | |
|---|---|---|---|---|---|---|
| Kabat | HCDR1 | HCDR2 | HCDR3 | LCDR1 | LCDR2 | LCDR3 |
| PI61 | SYGMH (SEQ ID NO: 86) | VISYDGSN KYYADSV | SGYALHDD YYGLDV | TGTSSDV GGYNYV | DVSNRPS (SEQ ID NO: 96) | SSYTSSS TLYV |
| | | KG (SEQ ID NO: 87) | (SEQ ID NO: 88) | S (SEQ ID NO: 95) | | (SEQ ID NO: 97) |
| B61-02 | SYGMH (SEQ ID NO: 86) | VISYKGSN KYYADSV KG (SEQ ID NO: 109) | SGYALHDD YYGLDV (SEQ ID NO: 88) | TGTSSDV GGYNYV S (SEQ ID NO: 95) | EVSNRLR (SEQ ID NO: 114) | SSYTSSS ALYV (SEQ ID NO: 115) |
| B61-10 | SYGMH (SEQ ID NO: 86) | VISYKGSN KYYADSV KG (SEQ ID NO: 109) | SGYALHDD YYGLDV (SEQ ID NO: 88) | TGTSSDV GGYNYV S (SEQ ID NO: 95) | EVSNRLR (SEQ ID NO: 114) | SSYTSSS TLYV (SEQ ID NO: 97) |
| Consensus | SYGMH (SEQ ID NO: 86) | VISYXGSN KYYADSV KG, wherein X is D or K (SEQ ID NO: 130) | SGYALHDD YYGLDV (SEQ ID NO: 88) | TGTSSDV GGYNYV S (SEQ ID NO: 95) | X₁VSNRX₂X₃, wherein X₁ is D or E; X₂ is P or L; and X₃ is S or R (SEQ ID NO: 131) | SSYTSSS XLYV, wherein X is T or A (SEQ ID NO: 132) |

TABLE 9

Chothia CDRs of exemplary B cell-derived anti-BCMA molecules

| | | | | | | |
|---|---|---|---|---|---|---|
| Chothia | HCDR1 | HCDR2 | HCDR3 | LCDR1 | LCDR2 | LCDR3 |
| PI61 | GFTFSSY (SEQ ID NO: 47) | SYDGSN (SEQ ID NO: 89) | SGYALHDDY YGLDV (SEQ ID NO: 88) | TSSDVGG YNY (SEQ ID NO: 98) | DVS (SEQ ID NO: 99) | YTSSSTLY (SEQ ID NO: 100) |
| B61-02 | GFTFSSY (SEQ ID NO: 47) | SYKGSN (SEQ ID NO: 110) | SGYALHDDY YGLDV (SEQ ID NO: 88) | TSSDVGG YNY (SEQ ID NO: 98) | EVS (SEQ ID NO: 116) | YTSSSAL Y (SEQ ID NO: 117) |
| B61-10 | GFTFSSY (SEQ ID NO: 47) | SYKGSN (SEQ ID NO: 110) | SGYALHDDY YGLDV (SEQ ID NO: 88) | TSSDVGG YNY (SEQ ID NO: 98) | EVS (SEQ ID NO: 116) | YTSSSTLY (SEQ ID NO: 100) |
| Consensus | GFTFSSY (SEQ ID NO: 47) | SYXGSN, wherein X is D or K (SEQ ID NO: 133) | SGYALHDDY YGLDV (SEQ ID NO: 88) | TSSDVGG YNY (SEQ ID NO: 98) | XVS, wherein X is D or E (SEQ ID NO: 134) | YTSSSXL Y, wherein X is T or A (SEQ ID NO: 135) |

TABLE 10

IMGT CDRs of exemplary B cell-derived anti-BCMA molecules

| | | | | | | |
|---|---|---|---|---|---|---|
| IMGT | HCDR1 | HCDR2 | HCDR3 | LCDR1 | LCDR2 | LCDR3 |
| PI61 | GFTFSSYG (SEQ ID NO: 90) | ISYDGSN K (SEQ ID NO: 91) | GGSGYALHDD YYGLDV (SEQ ID NO: 92) | SSDVGGY NY (SEQ ID NO: 101) | DVS (SEQ ID NO: 99) | SSYTSSSTL YV (SEQ ID NO: 97) |
| B61-02 | GFTFSSYG (SEQ ID NO: 90) | ISYKGSN K (SEQ ID NO: 111) | GGSGYALHDD YYGLDV (SEQ ID NO: 92) | SSDVGGY NY (SEQ ID NO: 101) | EVS (SEQ ID NO: 116) | SSYTSSSA LYV (SEQ ID NO: 115) |
| B61-10 | GFTFSSYG (SEQ ID NO: 90) | ISYKGSN K (SEQ ID NO: 111) | GGSGYALHDD YYGLDV (SEQ ID NO: 92) | SSDVGGY NY (SEQ ID NO: 101) | EVS (SEQ ID NO: 116) | SSYTSSSTL YV (SEQ ID NO: 97) |
| Consensus | GFTFSSYG (SEQ ID NO: 90) | ISYXGSN K, wherein X is D or K (SEQ ID NO: 136) | GGSGYALHDD YYGLDV (SEQ ID NO: 92) | SSDVGGY NY (SEQ ID NO: 101) | XVS, wherein X is D or E (SEQ ID NO: 134) | SSYTSSSX LYV, wherein X is T or A (SEQ ID NO: 132) |

TABLE 11

Amino acid and nucleic acid sequences of exemplary anti-BCMA molecules based on PI61

| | | |
|---|---|---|
| Identification | Protein sequence | DNA sequence (5′-3′) |
| Signal peptide | MALPVTALLLPLALLLHAARP (SEQ ID NO: 1) | Atggccctccctgtcaccgctctgttgctgccgcttgctctgctgctccacgcagcgcgaccg (SEQ ID NO: 252) |
| PI61 VH | QVQLQESGGGVVQPGRSLRLSCAASGFTFSSYGMHWVRQAPGKGLEWVAVISYDGSNKYYADSVKGRFTISRDNSKNTLYLQMNSLRAEDTAVYYCGGSGYALHDDYYGLDVWGQGTLVTVSS (SEQ ID NO: 93) | CAGGTACAATTGCAGGAGTCTGGAGGCGGTGTGGTGCAACCCGGTCGCAGCTTGCGCCTGAGTTGTGCTGCGTCTGGATTTACATTTTCATCTTACGGAATGCATTGGGTACGCCAGGCACCGGGGAAAGGCCTTGAATGGGTGGCTGTAATTTCATACGATGGTTCCAACAAATACTATGCTGACTCAGTCAAGGGTCGATTTACAATTAGTCGGGACAACTCCAAGAACACCCTTTATCTTCAAATGAATTCCCTTAGAGCAGAGGATACGGCGGTCTATTACTGTGGTGGCAGTGGTTATGCACTTCATGATGATTACTATGGCTTGGATGTCTGGGGGCAAGGGACGCTTGTAACTGTATCCTCT (SEQ ID NO: 260) |
| PI61 VL | QSALTQPASVSGSPGQSITISCTGTSSDVGGYNYVSWYQQHPGKAPKLMIYDVSNRPSGVSNRFSGSKSGNTASLTISGLQAEDEADYYCSSYTSSSTLYVFGSGTKVTVL (SEQ ID NO: 102) | CAATCTGCTCTGACTCAACCAGCAAGCGTATCAGGGTCACCGGGACAGAGTATTACCATAAGTTGCACGGGGACCTCTAGCGATGTAGGGGGGTATAATTATGTATCTTGGTATCAACAACACCCCGGGAAAGCCCCTAAATTGATGATCTACGACGTGAGCAATCGACCTAGTGGCGTATCAAATCGCTTCTCTGGTAGCAAGAGTGGGAATACGGCGTCCCTTACTATTAGCGGATTGCAAGCAGAAGATGAGGCCGATTACTACTGCAGCTCCTATACTAGCTCTTCTACATTGTACGTCTTTGGGAGCGGAACAAAAGTAACAGTACTC (SEQ ID NO: 261) |
| Linker | GGGGSGGGGSGGGGS (SEQ ID NO: 104) | |
| ScFv PI61 | QVQLQESGGGVVQPGRSLRLSCAASGFTFSSYGMHWVRQAPGKGLEWVAVISYDGSNKYYADSVKGRFTISRDNSKNTLYLQMNSLRAEDTAVYYCGGSGYALHDDYYGLDVWGQGTLVTVSSGGGGSGGGGSGGGGSQSALTQPASVSGSPGQSITISCTGTSSDVGGYNYVSWYQQHPGKAPKLMIYDVSNRPSGVSNRFSGSKSGNTASLTISGLQAEDEADYYCSSYTSSSTLYVFGSGTKVTVL (SEQ ID NO: 105) | CaggtacaattgcaggagtctggaggcggtgtgGtgcaacccggtcgcagcttgcgcctgagttgtGctgcgtctggatttacattttcatcttacggaAtgcattgggtacgccaggcaccggggaaaggcCttgaatgggtggctgtaatttcatacgatggtTccaacaaatactatgctgactcagtcaagggtCgatttacaattagtcgggacaactccaagaacAccctttatcttcaaatgaattcccttagagcaGaggatacggcggtctattactgtggtggcagtGgttatgcacttcatgatgattactatggcttgGatgtctgggggcaagggacgcttgtaactgtaTcctctggtggtggtggtagtggtgggggaggcTccggcggtggcggctctcaatctgctctgactCaaccagcaagcgtatcagggtcaccgggacagAgtattaccataagttgcacggggacctctagcGatgtaggggggtataattatgtatcttggtatCaacaacaccccgggaaagcccctaaattgatgAtctacgacgtgagcaatcgacctagtggcgtaTcaaatcgcttctctggtagcaagagtgggaatAcggcgtcccttactattagcggattgcaagcaGaagatgaggccgattactactgcagctcctatActagctcttctacattgtacgtctttgggagcggaacaaaagtaacagtactc (SEQ ID NO: 253) |
| Transmembrane domain and hinge | TTTPAPRPPTPAPTIASQPLSLRPEACRPAAGGAVHTRGLDFACDIYIWAPLAGTCGVLLLSLVITLYC (SEQ ID NO: 202) | AcaacaacacctgccccgagaccgcctacaccaGccccgactattgccagccagcctctgagcctcAggcctgaggcctgtaggcccgcagcgggcggcGcagttcatacacggggcttggatttcgcttgtGatatttatatttgggctcctttggcggggacaTgtggcgtgctgcttctgtcacttgttattacactgtactgt (SEQ ID NO: 254) |
| 4-1BB | KRGRKKLLYIFKQPFMRPVQTTQEEDGCSCRFPEEEEGGCEL (SEQ ID NO: 7) | AaacgcgggcgaaaaaaattgctgtatatttttAagcagccatttatgaggcccgttcagacgacgCaggaggaggacggttgctcttgcaggttcccagaagaggaagaagggggctgtgaattg (SEQ ID NO: 255) |
| CD3zeta | RVKFSRSADAPAYQQGQNQLYNELNLGRREEYDVLDKRRGRDPEMGGKPRRKNPQEGLYNELQKDKMAEAYSEIGMKGERRRGKGHDGLYQGLSTATKDTYDALHMQALPPR (SEQ ID NO: 10) | CgggttaaattttcaagatccgcagacgctccaGcataccaacagggacaaaaccaactctataacGagctgaatcttggaagaagggaggaatatgatGtgctggataaacggcgcggtagagatccggagAtgggcggaaaaccaaggcgaaaaaaccctcagGagggactctacaacgaactgcagaaagacaaaAtggcggaggcttattccgaaataggcatgaagGgcgagcggaggcgagggaaagggcacgacggaCtgtatcaaggcctctcaaccgcgactaaggatAcgtacgacgccctgcacatgcaggccctgcctccgaga (SEQ ID NO: 256) |
| PI61 full CAR construct | MALPVTALLLPLALLLHAARPQVQLQESGGGVVQPGRSLRLSCAASGFTFSSYGMHWVRQAPGKGLEWVAVISYDGSNKYYADSVKGRFTISRDNSKNTLYLQMNSLRAEDTAVYYCGGSGYALHDDYYGLDVWGQGTLVTVSSGGGGSGGGGSGGGGSQSALTQPASVSGSPGQSITISCTGTSSDVGGYNYVSWYQQHPGKAPKLMIYDVSNRPSGVSNRFSGSKSGNTASLTISGLQAEDEADYYCSSYTSSSTLYVFGSGTKVTVLTTTPAPRPPTPAPTIASQPLSLRPEACRPAAGGAVHTRGLDFACDIYIWAPLAGTCGVLLLSLVITLYCKRGRKKLLYIFKQPFMRPVQTTQEEDGCSCRFPEEEEGGCELRVKFSRSADAPAYQQGQNQLYNELNLGRREEYDVLDKRRGRDPEMGGKPRRKNPQEGLYNELQKDKMAEAYSEIGMKGERRRGKGHDGLYQGLSTATKDTYDALHMQALPPR (SEQ ID NO: 257) | ATGGCCCTCCCTGTCACCGCTCTGTTGCTGCCGCTTGCTCTGCTGCTCCACGCAGCGCGACCGCAGGTACAATTGCAGGAGTCTGGAGGCGGTGTGGTGCAACCCGGTCGCAGCTTGCGCCTGAGTTGTGCTGCGTCTGGATTTACATTTTCATCTTACGGAATGCATTGGGTACGCCAGGCACCGGGGAAAGGCCTTGAATGGGTGGCTGTAATTTCATACGATGGTTCCAACAAATACTATGCTGACTCAGTCAAGGGTCGATTTACAATTAGTCGGGACAACTCCAAGAACACCCTTTATCTTCAAATGAATTCCCTTAGAGCAGAGGATACGGCGGTCTATTACTGTGGTGGCAGTGGTTATGCACTTCATGATGATTACTATGGCTTGGATGTCTGGGGGCAAGGGACGCTTGTAACTGTATCCTCTGGTGGTGGTGGTAGTGGTGGGGGAGGCTCCGGCGGTGGCGGCTCTCAATCTGCTCTGACTCAACCAGCAAGCGTATCAGGGTCACCGGGACAGAGTATTACCATAAGTTGCACGGGGACCTCTAGCGATGTAGGGGGGTATAATTATGTATCTTGGTATCAACAACACCCCGGGAAAGCCCCTAAATTGATGATCTACGACGTGAGCAATCGACCTAGTGGCGTATCAAATCGCTTCTCTGGTAGCAAGAGTGGGAATACGGCGTCCCTTACTATTAGCGGATTGCAAGCAGAAGATGAGGCCGATTACTACTGCAGCTCCTATACTAGCTCTTCTACATTGTACGTCTTTGGGAGCGGAACAAAAGTAACAGTACTCACAACAACACCTGCCCCGAGACCGCCTACACCAGCCCCGACTATTGCCAGCCAGCCTCTGAGCCTCAGGCCTGAGGCCTGTAGGCCCGCAGCGGGCGGCGCAGTTCATACACGGGGCTTGGATTTCGCTTGTGATATTTATATTTGGGCTCCTTTGGCGGGGACATGTGGCGTGCTGCTTCTGTCACTTGTTATTACACTGTACTGTAAACGCGGGCGAAAAAAATTGCTGTATATTTTTAAGCAGCCATTTATGAGGCCCGTTCAGACGACGCAGGAGGAGGACGGTTGCTCTTGCAGGTTCCCAGAAGAGGAAGAAGGGGGCTGTGAATTGCGGGTTAAATTTTCAAGATCCGCAGACGCTCCAGCATACCAACAGGGACAAAACCAACTCTATAACGAGCTGAATCTTGGAAGAAGGGAGGAATATGATGTGCTGGATAAACGGCGCGGTAGAGATCCGGAGATGGGCGGAAAACCAAGGCGAAAAAACCCTCAGGAGGGACTCTACAACGAACTGCAGAAAGACAAAATGGCGGAGGCTTATTCCGAAATAGGCATGAAGGGCGAGCGGAGGCGAGGGAAAGGGCACGACGGACTGTATCAAGGCCTCTCAACCGCGACTAAGGATACGTACGACGCCCTGCACATGCAGGCCCTGCCTCCGAGA (SEQ ID NO: 258) |
| PI61 full CAR construct (Nucleic acid with signal peptide and stop codons) | | ATGGCCCTCCCTGTCACCGCTCTGTTGCTGCCGCTTGCTCTGCTGCTCCACGCAGCGCGACCGCAGGTACAATTGCAGGAGTCTGGAGGCGGTGTGGTGCAACCCGGTCGCAGCTTGCGCCTGAGTTGTGCTGCGTCTGGATTTACATTTTCATCTTACGGAATGCATTGGGTACGCCAGGCACCGGGGAAAGGCCTTGAATGGGTGGCTGTAATTTCATACGATGGTTCCAACAAATACTATGCTGACTCAGTCAAGGGTCGATTTACAATTAGTCGGGACAACTCCAAGAACACCCTTTATCTTCAAATGAATTCCCTTAGAGCAGAGGATACGGCGGTCTATTACTGTGGTGGCAGTGGTTATGCACTTCA TGATGATTACTATGGCTTGGATGTCTGGGGGCAAGGGACGCTTGTAACTGTATCCTCTGGTGGTGGTGGTAGTGGTGGGGGAGGCTCCGGCGGTGGCGGCTCTCAATCTGCTCTGACTCAACCAGCAAGCGTATCAGGGTCACCGGGACAGAGTATTACCATAAGTTGCACGGGGACCTCTAGCGATGTAGGGGGGTATAATTATGTATCTTGGTATCAACAACACCCCGGGAAAGCCCCTAAATTGATGATCTACGACGTGAGCAATCGACCTAGTGGCGTATCAAATCGCTTCTCTGGTAGCAAGAGTGGGAATACGGCGTCCCTTACTATTAGCGGATTGCAAGCAGAAGATGAGGCCGATTACTACTGCAGCTCCTATACTAGCTCTTCTACATTGTACGTCTTTGGGAGCGGAACAAAAGTAACAGTACTCACAACAACACCTGCCCCGAGACCGCCTACACCAGCCCCGACTATTGCCAGCCAGCCTCTGAGCCTCAGGCCTGAGGCCTGTAGGCCCGCAGCGGGCGGCGCAGTTCATACACGGGGCTTGGATTTCGCTTGTGATATTTATATTTGGGCTCCTTTGGCGGGGACATGTGGCGTGCTGCTTCTGTCACTTGTTATTACACTGTACTGTAAACGCGGGCGAAAAAAATTGCTGTATATTTTTAAGCAGCCATTTATGAGGCCCGTTCAGACGACGCAGGAGGAGGACGGTTGCTCTTGCAGGTTCCCAGAAGAGGAAGAAGGGGGCTGTGAATTGCGGGTTAAATTTTCAAGATCCGCAGACGCTCCAGCATACCAACAGGGACAAAACCAACTCTATAACGAGCTGAATCTTGGAAGAAGGGAGGAATATGATGTGCTGGATAAACGGCGCGGTAGAGATCCGGAGATGGGCGGAAAACCAAGGCGAAAAAACCCTCAGGAGGGACTCTACAACGAACTGCAGAAAGACAAAATGGCGGAGGCTTATTCCGAAATAGGCATGAAGGGCGAGCGGAGGCGAGGGAAAGGGCACGACGGACTGTATCAAGGCCTCTCAACCGCGACTAAGGATACGTACGACGCCCTGCACATGCAGGCCCTGCCTCCGAGATGATAA (SEQ ID NO: 416) |
| PI61 mature CAR protein | QVQLQESGGGVVQPGRSLRLSCAASGFTFSSYGMHWVRQAPGKGLEWVAVISYDGSNKYYADSVKGRFTISRDNSKNTLYLQMNSLRAEDTAVYYCGGSGYALHDDYYGLDVWGQGTLVTVSSGGGGSGGGGSGGGGSQSALTQPASVSGSPGQSITISCTGTSSDVGGYNYVSWYQQHPGKAPKLMIYDVSNRPSGVSNRFSGSKSGNTASLTISGLQAEDEADYYCSSYTSSSTLYVFGSGTKVTVLTTTPAPRPPTPAPTIASQPLSLRPEACRPAAGGAVHTRGLDFACDIYIWAPLAGTCGVLLLSLVITLYCKRGRKKLLYIFKQPFMRPVQTTQEEDGCSCRFPEEEEGGCELRVKFSRSADAPAYQQGQNQLYNELNLGRREEYDVLDKRRGRDPEMGGKPRRKNPQEGLYNELQKDKMAEAYSEIGMKGERRRGKGHDGLYQGLSTATKDTYDALHMQALPPR (SEQ ID NO: 107) | caggtacaattgcaggagtctggaggcggtgtggtgcaacccggtcgcagcttgcgcctgagttgtgctgcgtctggatttacattttcatcttacggaatgcattgggtacgccaggcaccggggaaaggccttgaatgggtggctgtaatttcatacgatggttccaacaaatactatgctgactcagtcaagggtcgatttacaattagtcgggacaactccaagaacaccctttatcttcaaatgaattcccttagagcagaggatacggcggtctattactgtggtggcagtggttatgcacttcatgatgattactatggcttggatgtctgggggcaagggacgcttgtaactgtatcctctggtggtggtggtagtggtgggggaggctccggcggtggcggctctcaatctgctctgactcaaccagcaagcgtatcagggtcaccgggacagagtattaccataagttgcacggggacctctagcgatgtaggggggtataattatgtatcttggtatcaacaacaccccgggaaagcccctaaattgatgatctacgacgtgagcaatcgacctagtggcgtatcaaatcgcttctctggtagcaagagtgggaatacggcgtcccttactattagcggattgcaagcagaagatgaggccgattactactgcagctcctatactagctcttctacattgtacgtctttgggagcggaacaaaagtaacagtactcacaacaacacctgccccgagaccgcctacaccagccccgactattgccagccagcctctgagcctcaggcctgaggcctgtaggcccgcagcgggcggcgcagttcatacacggggcttggatttcgcttgtgatatttatatttgggctcctttggcggggacatgtggcgtgctgcttctgtcacttgttattacactgtactgtaaacgcgggcgaaaaaaattgctgtatatttttaagcagccatttatgaggcccgttcagacgacgcaggaggaggacggttgctcttgcaggttcccagaagaggaagaagggggctgtgaattgcgggttaaattttcaagatccgcagacgctccagcataccaacagggacaaaaccaactctataacgagctgaatcttggaagaagggaggaatatgatgtgctggataaacggcgcggtagagatccggagatgggcggaaaaccaaggcgaaaaaaccctcaggagggactctacaacgaactgcagaaagacaaaatggcggaggcttattccgaaataggcatgaagggcgagcggaggcgagggaaagggcacgacggactgtatcaaggcctctcaaccgcgactaaggatacgtacgacgccctgcacatgcaggccctgcctccgaga (SEQ ID NO: 259) |

TABLE 12

Amino acid and nucleic acid sequences of exemplary hybridoma-derived anti-BCMA molecules

| SEQ ID NO | Name/ Description | Sequence |
|---|---|---|
| Hy03 | | |
| SEQ ID NO: 137 | HCDR1 (Kabat) | GFWMS |
| SEQ ID NO: 138 | HCDR2 (Kabat) | NIKQDGSEKYYVDSVRG |
| SEQ ID NO: 139 | HCDR3 (Kabat) | ALDYYGMDV |
| SEQ ID NO: 140 | HCDR1 (Chothia) | GFTFSGF |
| SEQ ID NO: 141 | HCDR2 (Chothia) | KQDGSE |
| SEQ ID NO: 139 | HCDR3 (Chothia) | ALDYYGMDV |
| SEQ ID NO: 142 | HCDR1 (IMGT) | GFTFSGFW |
| SEQ ID NO: 143 | HCDR2 (IMGT) | IKQDGSEK |
| SEQ ID NO: 144 | HCDR3 (IMGT) | ARALDYYGMDV |
| SEQ ID NO: 145 | VH | EVQLVESGGGLVQPGGSLRLSCAASGFTFSGFWMSWVRQAPGKGLEWVANIKQDGSEKYYVDSVRGRFTISRDNAKNSLYLQMNSLRAEDTAVYYCARALDYYGMDVWGQGTTVTVSS |
| SEQ ID NO: 146 | DNA VH | GAAGTGCAACTGGTGGAGAGCGGTGGAGGGCTTGTCCAGCCCGGAGGATCGCTGCGGCTGTCCTGTGCTGCGTCCGGGTTCACCTTCTCCGGCTTCTGGATGTCCTGGGTCAGACAGGCACCGGGAAAGGGCCTCGAATGGGTGGCCAACATCAAGCAGGATGGCTCCGAGAAGTACTACGTCGACTCCGTGAGAGGCCGCTTCACCATCTCCCGGGACAACGCCAAGAACTCGCTGTACCTCCAAATGAATAGCCTCAGGGCGGAAGATACTGCTGTGTATTACTGCGCACGCGCCCTTGACTACTACGGCATGGACGTCTGGGGCCAAGGGACCACTGTGACCGTGTCTAGC |
| SEQ ID NO: 147 | LCDR1 (Kabat) | RSSQSLLDSDDGNTYLD |
| SEQ ID NO: 148 | LCDR2 (Kabat) | TLSYRAS |
| SEQ ID NO: 149 | LCDR3 (Kabat) | TQRLEFPSIT |
| SEQ ID NO: 150 | LCDR1 (Chothia) | SQSLLDSDDGNTY |
| SEQ ID NO: 151 | LCDR2 (Chothia) | TLS |
| SEQ ID NO: 152 | LCDR3 (Chothia) | RLEFPSI |
| SEQ ID NO: 153 | LCDR1 (IMGT) | QSLLDSDDGNTY |
| SEQ ID NO: 151 | LCDR2 (IMGT) | TLS |
| SEQ ID NO: 149 | LCDR3 (IMGT) | TQRLEFPSIT |
| SEQ ID NO: 154 | VL | DIVMTQTPLSLPVTPGEPASISCRSSQSLLDSDDGNTYLDWYLQKPGQSPRLLIYTLSYRASGVPDRFSGSGSGTDFTLKISRVEAEDVGLYYCTQRLEFPSITFGQGTRLEIK |
| SEQ ID NO: 155 | DNA VL | GATATCGTGATGACCCAGACTCCCCTGTCCCTGCCTGTGACTCCCGGAGAACCAGCCTCCATTTCCTGCCGGTCCTCCCAGTCCCTGC |
| | | TGGACAGCGACGACGGCAACACTTACCTGGACTGGTACTTGCAGAAGCCGGGCCAATCGCCTCGCCTGCTGATCTATACCCTGTCATACCGGGCCTCAGGAGTGCCTGACCGCTTCTCGGGATCAGGGAGCGGGACCGATTTCACCCTGAAAATTTCCCGAGTGGAAGCCGAGGACGTCGGACTGTACTACTGCACCCAGCGCCTCGAATTCCCGTCGATTACGTTTGGACAGGGTACCCGGCTTGAGATCAAG |
| SEQ ID NO: 63 | Linker | GGGGSGGGGSGGGGSGGGGS |
| SEQ ID NO: 156 | scFv (VH-linker-VL) | EVQLVESGGGLVQPGGSLRLSCAASGFTFSGFWMSWVRQAPGKGLEWVANIKQDGSEKYYVDSVRGRFTISRDNAKNSLYLQMNSLRAEDTAVYYCARALDYYGMDVWGQGTTVTVSSGGGGSGGGGSGGGGSGGGGSDIVMTQTPLSLPVTPGEPASISCRSSQSLLDSDDGNTYLDWYLQKPGQSPRLLIYTLSYRASGVPDRFSGSGSGTDFTLKISRVEAEDVGLYYCTQRLEFPSITFGQGTRLEIK |
| SEQ ID NO: 157 | DNA scFv | GAAGTGCAACTGGTGGAGAGCGGTGGAGGGCTTGTCCAGCCCGGAGGATCGCTGCGGCTGTCCTGTGCTGCGTCCGGGTTCACCTTCTCCGGCTTCTGGATGTCCTGGGTCAGACAGGCACCGGGAAAGGGCCTCGAATGGGTGGCCAACATCAAGCAGGATGGCTCCGAGAAGTACTACGTCGACTCCGTGAGAGGCCGCTTCACCATCTCCCGGGACAACGCCAAGAACTCGCTGTACCTCCAAATGAATAGCCTCAGGGCGGAAGATACTGCTGTGTATTACTGCGCACGCGCCCTTGACTACTACGGCATGGACGTCTGGGGCCAAGGGACCACTGTGACCGTGTCTAGCGGAGGCGGAGGTTCAGGGGGCGGTGGATCAGGCGGAGGAGGATCGGGGGGTGGTGGATCGGATATCGTGATGACCCAGACTCCCCTGTCCCTGCCTGTGACTCCCGGAGAACCAGCCTCCATTTCCTGCCGGTCCTCCCAGTCCCTGCTGGACAGCGACGACGGCAACACTTACCTGGACTGGTACTTGCAGAAGCCGGGCCAATCGCCTCGCCTGCTGATCTATACCCTGTCATACCGGGCCTCAGGAGTGCCTGACCGCTTCTCGGGATCAGGGAGCGGGACCGATTTCACCCTGAAAATTTCCCGAGTGGAAGCCGAGGACGTCGGACTGTACTACTGCACCCAGCGCCTCGAATTCCCGTCGATTACGTTTGGACAGGGTACCCGGCTTGAGATCAAG |
| SEQ ID NO: 158 | Full CAR amino acid sequence | EVQLVESGGGLVQPGGSLRLSCAASGFTFSGFWMSWVRQAPGKGLEWVANIKQDGSEKYYVDSVRGRFTISRDNAKNSLYLQMNSLRAEDTAVYYCARALDYYGMDVWGQGTTVTVSSGGGGSGGGGSGGGGSGGGGSDIVMTQTPLSLPVTPGEPASISCRSSQSLLDSDDGNTYLDWYLQKPGQSPRLLIYTLSYRASGVPDRFSGSGSGTDFTLKISRVEAEDVGLYYCTQRLEFPSITFGQGTRLEIKTTTPAPRPPTPAPTIASQPLSLRPEACRPAAGGAVHTRGLDFACDIYIWAPLAGTCGVLLLSLVITLYCKRGRKKLLYIFKQPFMRPVQTTQEEDGCSCRFPEEEEGGCELRVKFSRSADAPAYQQGQNQLYNELNLGRREEYDVLDKRRGRDPEMGGKPRRKNPQEGLYNELQKDKMAEAYSEIGMKGERRRGKGHDGLYQGLSTATKDTYDALHMQALPPR |
| SEQ ID NO: 159 | Full CAR DNA sequence | GAAGTGCAACTGGTGGAGAGCGGTGGAGGGCTTGTCCAGCCCGGAGGATCGCTGCGGCTGTCCTGTGCTGCGTCCGGGTTCACCTTCTCCGGCTTCTGGATGTCCTGGGTCAGACAGGCACCGGGAAAGGGCCTCGAATGGGTGGCCAACATCAAGCAGGATGGCTCCGAGAAGTACTACGTCGACTCCGTGAGAGGCCGCTTCACCATCTCCCGGGACAACGCCAAGAACTCGCTGTACCTCCAAATGAATAGCCTCAGGGCGGAAGATACTGCTGTGTATTACTGCGCACGCGCCCTTGACTACTACGGCATGGACGTCTGGGGCCAAGGGACCACTGTGACCGTGTCTAGCGGAGGCGGAGGTTCAGGGGGCGGTGGATCAGGCGGAGGAGGATCGGGGGGTGGTGGATCGGATATCGTGATGACCCAGACTCCCCTGTCCCTGCCTGTGACTCCCGGAGAACCAGCCTCCATTTCCTGCCGGTCCTCCCAGTCCCTGCTGGACAGCGACGACGGCAACACTTACCTGGACTGGTACTTGCAGAAGCCGGGCCAATCGCCTCGCCTGCTGATCTATACCCTGTCATACCGGGCCTCAGGAGTGCCTGACCGCTTCTCGGGATCAGGGAGCGGGACCGATTTCACCCTGAAAATTTCCCGAGTGGAAGCCGAGGACGTCGGACTGTACTACTGCACCCAGCGCCTCGAATTCCCGTCGATTACGTTTGGACAGGGTACCCGGCTTGAGATCAAGACCACTACCCCAGCACCGAGGCCACCCACCCCGGCTCCTACCATCGCCTCCCAGCCTCTGTCCCTGCGTCCGGAGGCATGTAGACCCGCAGCTGGTGGGGCCGTGCATACCCGGGGTCTTGACTTCGCCTGCGATATCTACATTTGGGCCCCTCTGGCTGGTACTTGCGGGGTCCTGCTGCTTTCACTCGTGATCACTCTTTACTGTAAGCGCGGTCGGAAGAAGCTGCTGTACATCTTTAAGCAACCCTTCATGAGGCCTGTGCAGACTACTCAAGAGGAGGACGGCTGTTCATGCCGGTTCCCAGAGGAGGAGGAAGGCGGCTGCGAACTGCGCGTGAAATTCAGCCGCAGCGCAGATGCTCCAGCCTACCAGCAGGGGCAGAACCAGCTCTACAACGAACTCAATCTTGGTCGGAGAGAGGAGTACGACGTGCTGGACAAGCGGAGAGGACGGGACCCAGAAATGGGCGGGAAGCCGCGCAGAAAGAATCCCCAAGAGGGCCTGTACAACGAGCTCCAAAAGGATAAGATGGCAGAAGCCTATAGCGAGATTGGTATGAAAGGGGAACGCAGAAGAGGCAAAGGCCACGACGGACTGTACCAGGGACTCAGCACCGCCACCAAGGACACCTATGACGCTCTTCACATGCAGGCCCTGCCGCCTCGG |
| Hy52 | | |
| SEQ ID NO: 160 | HCDR1 (Kabat) | SFRMN |
| SEQ ID NO: 161 | HCDR2 (Kabat) | SISSSSSYIYYADSVKG |
| SEQ ID NO: 162 | HCDR3 (Kabat) | WLSYYGMDV |
| SEQ ID NO: 163 | HCDR1 (Chothia) | GFTFSSF |
| SEQ ID NO: 164 | HCDR2 (Chothia) | SSSSSY |
| SEQ ID NO: 162 | HCDR3 (Chothia) | WLSYYGMDV |
| SEQ ID NO: 165 | HCDR1 (IMGT) | GFTFSSFR |
| SEQ ID NO: 166 | HCDR2 (IMGT) | ISSSSSYI |
| SEQ ID NO: 167 | HCDR3 (IMGT) | ARWLSYYGMDV |
| SEQ ID NO: 168 | VH | EVQLVESGGGLVKPGGSLRLSCAASGFTFSSFRMNWVRQAPGKGLEWVSSISSSSSYIYYADSVKGRFTISRDNAKNSLYLQMNSLRAEDTAVYYCARWLSYYGMDVWGQGTTVTVSS |
| SEQ ID NO: 169 | DNA VH | GAAGTGCAACTGGTGGAGAGCGGTGGAGGGCTTGTCAAGCCCGGAGGATCGCTGCGGCTGTCCTGTGCTGCGTCCGGGTTCACCTTCTCCTCGTTCCGCATGAACTGGGTCAGACAGGCACCGGGAAAGGGCCTCGAATGGGTGTCCTCAATCTCATCGTCCTCGTCCTACATCTACTACGCCGACTCCGTGAAAGGCCGCTTCACCATCTCCCGGGACAACGCCAAGAACTCGCTGTACCTCCAAATGAATAGCCTCAGGGCGGAAGATACTGCTGTGTATTACTGCGCACGCTGGCTTTCCTACTACGGCATGGACGTCTGGGGCCAAGGGACCACTGTGACCGTGTCTAGC |
| SEQ ID NO: 147 | LCDR1 (Kabat) | RSSQSLLDSDDGNTYLD |
| SEQ ID NO: 170 | LCDR2 (Kabat) | TLSFRAS |
| SEQ ID NO: 171 | LCDR3 (Kabat) | MQRIGFPIT |
| SEQ ID NO: 150 | LCDR1 (Chothia) | SQSLLDSDDGNTY |
| SEQ ID NO: 151 | LCDR2 (Chothia) | TLS |
| SEQ ID NO: 172 | LCDR3 (Chothia) | RIGFPI |
| SEQ ID NO: 153 | LCDR1 (IMGT) | QSLLDSDDGNTY |
| SEQ ID NO: 151 | LCDR2 (IMGT) | TLS |
| SEQ ID NO: 171 | LCDR3 (IMGT) | MQRIGFPIT |
| SEQ ID NO: 173 | VL | DIVMTQTPLSLPVTPGEPASISCRSSQSLLDSDDGNTYLDWYLQKPGQSPQLLIYTLSFRASGVPDRFSGSGSGTDFTLKIRRVEAEDVGVYYCMQRIGFPITFGQGTRLEIK |
| SEQ ID NO: 174 | DNA VL | GATATCGTGATGACCCAGACTCCCCTGTCCCTGCCTGTGACTCCCGGAGAACCAGCCTCCATTTCCTGCCGGTCCTCCCAGTCCCTGCTGGACAGCGACGACGGCAACACTTACCTGGACTGGTACTTGCAGAAGCCGGGCCAATCGCCTCAGCTGCTGATCTATACCCTGTCATTCCGGGCCTCAGGAGTGCCTGACCGCTTCTCGGGATCAGGGAGCGGGACCGATTTCACCCTGAAAATTAGGCGAGTGGAAGCCGAGGACGTCGGAGTGTACTACTGCATGCAGCGCATCGGCTTCCCGATTACGTTTGGACAGGGTACCCGGCTTGAGATCAAG |
| SEQ ID NO: 63 | Linker | GGGGSGGGGSGGGGSGGGGS |
| SEQ ID NO: 175 | scFv (VH-linker-VL) | EVQLVESGGGLVKPGGSLRLSCAASGFTFSSFRMNWVRQAPGKGLEWVSSISSSSSYIYYADSVKGRFTISRDNAKNSLYLQMNSLRAEDTAVYYCARWLSYYGMDVWGQGTTVTVSSGGGGSGGGGSGGGGSGGGGSDIVMTQTPLSLPVTPGEPASISCRSSQSLLDSDDGNTYLDWYLQKPGQSPQLLIYTLSFRASGVPDRFSGSGSGTDFTLKIRRVEAEDVGVYYCMQRIGFPITFGQGTRLEIK |
| SEQ ID NO: 176 | DNA scFv | GAAGTGCAACTGGTGGAGAGCGGTGGAGGGCTTGTCAAGCCCGGAGGATCGCTGCGGCTGTCCTGTGCTGCGTCCGGGTTCACCTTCTCCTCGTTCCGCATGAACTGGGTCAGACAGGCACCGGGAAAGGGCCTCGAATGGGTGTCCTCAATCTCATCGTCCTCGTCCTACATCTACTACGCCGACTCCGTGAAAGGCCGCTTCACCATCTCCCGGGACAACGCCAAGAACTCGCTGTACCTCCAAATGAATAGCCTCAGGGCGGAAGATACTGCTGTGTATTACTGCGCACGCTGGCTTTCCTACTACGGCATGGACGTCTGGGGCCAAGGGACCACTGTGACCGTGTCTAGCGGAGGCGGAGGTTCAGGGGGCGGTGGATCAGGCGGAGGAGGATCGGGGGGTGGTGGATCGGATATCGTGATGACCCAGACTCCCCTGTCCCTGCCTGTGACTCCCGGAGAACCAGCCTCCATTTCCTGCCGGTCCTCCCAGTCCCTGCTGGACAGCGACGACGGCAACACTTACCTGGACTGGTACTTGCAGAAGCCGGGCCAATCGCCTCAGCTGCTGATCTATACCCTGTCATTCCGGGCCTCAGGAGTGCCTGACCGCTTCTCGGGATCAGGGAGCGGGACCGATTTCACCCTGAAAATTAGGCGAGTGGAAGCCGAGGACGTCGGAGTGTACTACTGCATGCAGCGCATCGGCTTCCCGATTACGTTTGGACAGGGTACCCGGCTTGAGATCAAG |
| SEQ ID NO: 177 | Full CAR amino acid sequence | EVQLVESGGGLVKPGGSLRLSCAASGFTFSSFRMNWVRQAPGKGLEWVSSISSSSSYIYYADSVKGRFTISRDNAKNSLYLQMNSLRAEDTAVYYCARWLSYYGMDVWGQGTTVTVSSGGGGSGGGGSGGGGSGGGGSDIVMTQTPLSLPVTPGEPASISCRSSQSLLDSDDGNTYLDWYLQKPGQSPQLLIYTLSFRASGVPDRFSGSGSGTDFTLKIRRVEAEDVGVYYCMQRIGFPITFGQGTRLEIKTTTPAPRPPTPAPTIASQPLSLRPEACRPAAGGAVHTRGLDFACDIYIWAPLAGTCGVLLLSLVITLYCKRGRKKLLYIFKQPFMRPVQTTQEEDGCSCRFPEEEEGGCELRVKFSRSADAPAYQQGQNQLYNELNLGRREEYDVLDKRRGRDPEMGGKPRRKNPQEGLYNELQKDKMAEAYSEIGMKGERRRGKGHDGLYQGLSTATKDTYDALHMQALPPR |
| SEQ ID NO: 178 | Full CAR DNA sequence | GAAGTGCAACTGGTGGAGAGCGGTGGAGGGCTTGTCAAGCCCGGAGGATCGCTGCGGCTGTCCTGTGCTGCGTCCGGGTTCACCTTCTCCTCGTTCCGCATGAACTGGGTCAGACAGGCACCGGGAAAGGGCCTCGAATGGGTGTCCTCAATCTCATCGTCCTCGTCCTACATCTACTACGCCGACTCCGTGAAAGGCCGCTTCACCATCTCCCGGGACAACGCCAAGAACTCGCTGTACCTCCAAATGAATAGCCTCAGGGCGGAAGATACTGCTGTGTATTACTGCGCACGCTGGCTTTCCTACTACGGCATGGACGTCTGGGGCCAAGGGACCACTGTGACCGTGTCTAGCGGAGGCGGAGGTTCAGGGGGCGGTGGATCAGGCGGAGGAGGATCGGGGGGTGGTGGATCGGATATCGTGATGACCCAGACTCCCCTGTCCCTGCCTGTGACTCCCGGAGAACCAGCCTCCATTTCCTGCCGGTCCTCCCAGTCCCTGCTGGACAGCGACGACGGCAACACTTACCTGGACTGGTACTTGCAGAAGCCGGGCCAATCGCCTCAGCTGCTGATCTATACCCTGTCATTCCGGGCCTCAGGAGTGCCTGACCGCTTCTCGGGATCAGGGAGCGGGACCGATTTCACCCTGAAAATTAGGCGAGTGGAAGCCGAGGACGTCGGAGTGTACTACTGCATGCAGCGCATCGGCTTCCCGATTACGTTTGGACAGGGTACCCGGCTTGAGATCAAGACCACTACCCCAGCACCGAGGCCACCCACCCCGGCTCCTACCATCGCCTCCCAGCCTCTGTCCCTGCGTCCGGAGGCATGTAGACCCGCAGCTGGTGGGGCCGTGCATACCCGGGGTCTTGACTTCGCCTGCGATATCTACATTTGGGCCCCTCTGGCTGGTACTTGCGGGGTCCTGCTGCTTTCACTCGTGATCACTCTTTACTGTAAGCGCGGTCGGAAGAAGCTGCTGTACATCTTTAAGCAACCCTTCATGAGGCCTGTGCAGACTACTCAAGAGGAGGACGGCTGTTCATGCCGGTTCCCAGAGGAGGAGGAAGGCGGCTGCGAACTGCGCGTGAAATTCAGCCGCAGCGCAGATGCTCCAGCCTACCAGCAGGGGCAGAACCAGCTCTACAACGAACTCAATCTTGGTCGGAGAGAGGAGTACGACGTGCTGGACAAGCGGAGAGGACGGGACCCAGAAATGGGCGGGAAGCCGCGCAGAAAGAATCCCCAAGAGGGCCTGTACAACGAGCTCCAAAAGGATAAGATGGCAGAAGCCTATAGCGAGATTGGTATGAAAGGGGAACGCAGAAGAGGCAAAGGCCACGACGGACTGTACCAGGGACTCAGCACCGCCACCAAGGACACCTATGACGCTCTTCACATGCAGGCCCTGCCGCCTCGG |

TABLE 13

Kabat CDRs of exemplary hybridoma-derived anti-BCMA molecules

| | | | | | | |
|---|---|---|---|---|---|---|
| Kabat | HCDR1 | HCDR2 | HCDR3 | LCDR1 | LCDR2 | LCDR3 |
| Hy03 | GFWMS (SEQ ID NO: 137) | NIKQDGSEK YYVDSVRG (SEQ ID NO: 138) | ALDYYGMD V (SEQ ID NO: 139) | RSSQSLLDS DDGNTYLD (SEQ ID NO: 147) | TLSYRA S (SEQ ID NO: 148) | TQRLEFP SIT (SEQ ID NO: 149) |
| Hy52 | SFRMN (SEQ ID NO: 160) | SISSSSSYIYY ADSVKG (SEQ ID NO: 161) | WLSYYGMD V (SEQ ID NO: 162) | RSSQSLLDS DDGNTYLD (SEQ ID NO: 147) | TLSFRAS (SEQ ID NO: 170) | MQRIGFP IT (SEQ ID NO: 171) |
| Consensus | X₁FX₂MX₃, wherein X₁ is G or S; X₂ is W or R; and X₃ is S or N (SEQ ID NO: 179) | X₁IX₂X₃X₄X₅S X₆X₇YYX₈DS VX₉G, wherein X₁ is N or S; X₂ is K or S; X₃ is Q or S; X₄ is D or S; X₅ is G or S; X₆ is E or Y; X₇ is K or I; X₈ is V or A; and X₉ is R or K (SEQ ID NO: 180) | X₁LX₂YYGM DV, wherein X₁ is A or W; and X₂ is D or S (SEQ ID NO: 181) | RSSQSLLDS DDGNTYLD (SEQ ID NO: 147) | TLSXRA S, wherein X is Y or F (SEQ ID NO: 182) | X₁QRX₂X ₃FPX₄IT, wherein X₁ is T or M; X₂ is L or I; X₃ is E or G; and X₄ is S or absent (SEQ ID NO: 183) |

TABLE 14

Chothia CDRs of exemplary hybridoma-derived anti-BCMA molecules

| | | | | | | |
|---|---|---|---|---|---|---|
| Chothia | HCDR1 | HCDR2 | HCDR3 | LCDR1 | LCDR2 | LCDR3 |
| Hy03 | GFTFSGF (SEQ ID NO: 140) | KQDGSE (SEQ ID NO: 141) | ALDYYGMD V (SEQ ID NO: 139) | SQSLLDSD DGNTY (SEQ ID NO: 150) | TLS (SEQ ID NO: 151) | RLEFPSI (SEQ ID NO: 152) |
| Hy52 | GFTFSSF (SEQ ID NO: 163) | SSSSSY (SEQ ID NO: 164) | WLSYYGMD V (SEQ ID NO: 162) | SQSLLDSD DGNTY (SEQ ID NO: 150) | TLS (SEQ ID NO: 151) | RIGFPI (SEQ ID NO: 172) |
| Consensus | GFTFSXF, wherein X is G or S (SEQ ID NO: 184) | X₁X₂X₃X₄SX₅, wherein X₁ is K or S; X₂ is Q or S; X₃ is D or S; X₄ is G or S; and X₅ is E or Y (SEQ ID NO: 185) | X₁LX₂YYGM DV, wherein X₁ is A or W; and X₂ is D or S (SEQ ID NO: 181) | SQSLLDSD DGNTY (SEQ ID NO: 150) | TLS (SEQ ID NO: 151) | RX₁X₂FP X₃I, wherein X₁ is L or I; X₂ is E or G; and X₃ is S or absent (SEQ ID NO: 186) |

TABLE 15

IMGT CDRs of exemplary hybridoma-derived anti-BCMA molecules

| | | | | | | |
|---|---|---|---|---|---|---|
| IMGT | HCDR1 | HCDR2 | HCDR3 | LCDR1 | LCDR2 | LCDR3 |
| Hy03 | GFTFSGF W (SEQ ID NO: 142) | IKQDGSEK (SEQ ID NO: 143) | ARALDYYG MDV (SEQ ID NO: 144) | QSLLDSDD GNTY (SEQ ID NO: 153) | TLS (SEQ ID NO: 151) | TQRLEFPS IT (SEQ ID NO: 149) |
| Hy52 | GFTFSSFR (SEQ ID NO: 165) | ISSSSSYI (SEQ ID NO: 166) | ARWLSYYG MDV (SEQ ID NO: 167) | QSLLDSDD GNTY (SEQ ID NO: 153) | TLS (SEQ ID NO: 151) | MQRIGFPI T (SEQ ID NO: 171) |
| Consensus | GFTFSX1F X₂, wherein X₁ is G or S; and X₂ is W or R (SEQ ID NO: 187) | IX₁X₂X₃X₄SX ₅X₆, wherein X₁ is K or S; X₂ is Q or S; X₃ is D or S; X₄ is G or S; X₅ is E or Y; and X₆ is K or I (SEQ ID NO: 188) | ARX₁LX₂YY GMDV, wherein X₁ is A or W; and X₂ is D or S (SEQ ID NO: 189) | QSLLDSDD GNTY (SEQ ID NO: 153) | TLS (SEQ ID NO: 151) | X₁QRX₂X₃ FPX₄IT, wherein X₁ is T or M; X₂ is L or I; X₃ is E or G; and X₄ is S or absent (SEQ ID NO: 183) |

[0624] In some embodiments, the human anti-BCMA binding domain comprises a HC CDR1, HC CDR2, HC CDR3, LC CDR1, LC CDR2, and LC CDR3.

[0625] In certain embodiments, the CAR molecule described herein or the anti-BCMA binding domain described herein includes:
[0626] (1) one, two, or three light chain (LC) CDRs chosen from: (i) a LC CDR1 of SEQ ID NO: 54, LC CDR2 of SEQ ID NO: 55 and LC CDR3 of SEQ ID NO: 56; and/or
[0627] (2) one, two, or three heavy chain (HC) CDRs from one of the following: (i) a HC CDR1 of SEQ ID NO: 44, HC CDR2 of SEQ ID NO: 45 and HC CDR3 of SEQ ID NO: 84; (ii) a HC CDR1 of SEQ ID NO: 44, HC CDR2 of SEQ ID NO: 45 and HC CDR3 of SEQ ID NO: 46; (iii) a HC CDR1 of SEQ ID NO: 44, HC CDR2 of SEQ ID NO: 45 and HC CDR3 of SEQ ID NO: 68; or (iv) a HC CDR1 of SEQ ID NO: 44, HC CDR2 of SEQ ID NO: 45 and HC CDR3 of SEQ ID NO: 76.

[0628] In certain embodiments, the CAR molecule described herein or the anti-BCMA binding domain described herein includes:
[0629] (1) one, two, or three light chain (LC) CDRs from one of the following: (i) a LC CDR1 of SEQ ID NO: 95, LC CDR2 of SEQ ID NO: 131 and LC CDR3 of SEQ ID NO: 132; (ii) a LC CDR1 of SEQ ID NO: 95, LC CDR2 of SEQ ID NO: 96 and LC CDR3 of SEQ ID NO: 97; (iii) a LC CDR1 of SEQ ID NO: 95, LC CDR2 of SEQ ID NO: 114 and LC CDR3 of SEQ ID NO: 115; or (iv) a LC CDR1 of SEQ ID NO: 95, LC CDR2 of SEQ ID NO: 114 and LC CDR3 of SEQ ID NO: 97; and/or
[0630] (2) one, two, or three heavy chain (HC) CDRs from one of the following: (i) a HC CDR1 of SEQ ID NO: 86, HC CDR2 of SEQ ID NO: 130 and HC CDR3 of SEQ ID NO: 88; (ii) a HC CDR1 of SEQ ID NO: 86, HC CDR2 of SEQ ID NO: 87 and HC CDR3 of SEQ ID NO: 88; or (iii) a HC CDR1 of SEQ ID NO: 86, HC CDR2 of SEQ ID NO: 109 and HC CDR3 of SEQ ID NO: 88.

[0631] In certain embodiments, the CAR molecule described herein or the anti-BCMA binding domain described herein includes:
[0632] (1) one, two, or three light chain (LC) CDRs from one of the following: (i) a LC CDR1 of SEQ ID NO: 147, LC CDR2 of SEQ ID NO: 182 and LC CDR3 of SEQ ID NO: 183; (ii) a LC CDR1 of SEQ ID NO: 147, LC CDR2 of SEQ ID NO: 148 and LC CDR3 of SEQ ID NO: 149; or (iii) a LC CDR1 of SEQ ID NO: 147, LC CDR2 of SEQ ID NO: 170 and LC CDR3 of SEQ ID NO: 171; and/or
[0633] (2) one, two, or three heavy chain (HC) CDRs from one of the following: (i) a HC CDR1 of SEQ ID NO: 179, HC CDR2 of SEQ ID NO: 180 and HC CDR3 of SEQ ID NO: 181; (ii) a HC CDR1 of SEQ ID NO: 137, HC CDR2 of SEQ ID NO: 138 and HC CDR3 of SEQ ID NO: 139; or (iii) a HC CDR1 of SEQ ID NO: 160, HC CDR2 of SEQ ID NO: 161 and HC CDR3 of SEQ ID NO: 162.

[0634] In some embodiments, the HC CDR1, HC CDR2, HC CDR3, LC CDR1, LC CDR2, and LC CDR3 comprise the amino acid sequences of SEQ ID NOs: 44, 45, 84, 54, 55, and 56, respectively. In some embodiments, the HC CDR1, HC CDR2, HC CDR3, LC CDR1, LC CDR2, and LC CDR3 comprise the amino acid sequences of SEQ ID NOs: 44, 45, 46, 54, 55, and 56, respectively. In some embodiments, the HC CDR1, HC CDR2, HC CDR3, LC CDR1, LC CDR2, and LC CDR3 comprise the amino acid sequences of SEQ ID NOs: 44, 45, 68, 54, 55, and 56, respectively. In some embodiments, the HC CDR1, HC CDR2, HC CDR3, LC CDR1, LC CDR2, and LC CDR3 comprise the amino acid sequences of SEQ ID NOs: 44, 45, 76, 54, 55, and 56, respectively.

[0635] In some embodiments, the HC CDR1, HC CDR2, HC CDR3, LC CDR1, LC CDR2, and LC CDR3 comprise the amino acid sequences of SEQ ID NOs: 47, 48, 84, 57, 58, and 59, respectively. In some embodiments, the HC CDR1, HC CDR2, HC CDR3, LC CDR1, LC CDR2, and LC CDR3 comprise the amino acid sequences of SEQ ID NOs: 47, 48, 46, 57, 58, and 59, respectively. In some embodiments, the HC CDR1, HC CDR2, HC CDR3, LC CDR1, LC CDR2, and LC CDR3 comprise the amino acid sequences of SEQ ID NOs: 47, 48, 68, 57, 58, and 59, respectively. In some embodiments, the HC CDR1, HC CDR2, HC CDR3, LC CDR1, LC CDR2, and LC CDR3 comprise the amino acid sequences of SEQ ID NOs: 47, 48, 76, 57, 58, and 59, respectively.

[0636] In some embodiments, the HC CDR1, HC CDR2, HC CDR3, LC CDR1, LC CDR2, and LC CDR3 comprise the amino acid sequences of SEQ ID NOs: 49, 50, 85, 60, 58, and 56, respectively. In some embodiments, the HC CDR1, HC CDR2, HC CDR3, LC CDR1, LC CDR2, and LC CDR3 comprise the amino acid sequences of SEQ ID NOs: 49, 50, 51, 60, 58, and 56, respectively. In some embodiments, the HC CDR1, HC CDR2, HC CDR3, LC CDR1, LC CDR2, and LC CDR3 comprise the amino acid sequences of SEQ ID NOs: 49, 50, 69, 60, 58, and 56, respectively. In some embodiments, the HC CDR1, HC CDR2, HC CDR3, LC CDR1, LC CDR2, and LC CDR3 comprise the amino acid sequences of SEQ ID NOs: 49, 50, 77, 60, 58, and 56, respectively.

[0637] In some embodiments, the human anti-BCMA binding domain comprises a scFv comprising a VH (for example, a VH described herein) and VL (for example, a VL described herein). In some embodiments, the VH is attached to the VL via a linker, for example, a linker described herein, for example, a linker described in Table 1. In some embodiments, the human anti-BCMA binding domain comprises a (Gly4-Ser)n linker, wherein n is 1, 2, 3, 4, 5, or 6, preferably 3 or 4 (SEQ ID NO: 26). The light chain variable region and heavy chain variable region of a scFv can be, for example, in any of the following orientations: light chain variable region-linker-heavy chain variable region or heavy chain variable region-linker-light chain variable region.

[0638] In some embodiments, the anti-BCMA binding domain is a fragment, for example, a single chain variable fragment (scFv). In some embodiments, the anti-BCMA binding domain is a Fv, a Fab, a (Fab′)2, or a bi-functional (for example bi-specific) hybrid antibody (for example, Lanzavecchia et al., Eur. J. Immunol. 17, 105 (1987)). In some embodiments, the antibodies and fragments thereof of the invention binds a BCMA protein with wild-type or enhanced affinity.

[0639] In some instances, scFvs can be prepared according to method known in the art (see, for example, Bird et al., (1988) Science 242:423-426 and Huston et al., (1988) Proc. Natl. Acad. Sci. USA 85:5879-5883). ScFv molecules can be produced by linking VH and VL regions together using flexible polypeptide linkers. The scFv molecules comprise a linker (for example, a Ser-Gly linker) with an optimized length and/or amino acid composition. The linker length can greatly affect how the variable regions of a scFv fold and interact. In fact, if a short polypeptide linker is employed (for example, between 5-10 amino acids) intrachain folding is prevented. Interchain folding is also required to bring the two variable regions together to form a functional epitope binding site. For examples of linker orientation and size see, for example, Hollinger et al. 1993 Proc Natl Acad. Sci. U.S.A. 90:6444-6448, U.S. Pat. Application Publication Nos. 2005/0100543, 2005/0175606, 2007/0014794, and PCT publication Nos. WO2006/020258 and WO2007/024715, is incorporated herein by reference.

[0640] An scFv can comprise a linker of at least 1, 2, 3, 4, 5, 6, 7, 8, 9, 10, 11, 12, 13, 14, 15, 16, 17, 18, 19, 20, 25, 30, 35, 40, 45, 50, or more amino acid residues between its VL and VH regions. The linker sequence may comprise any naturally occurring amino acid. In some embodiments, the linker sequence comprises amino acids glycine and serine. In some embodiments, the linker sequence comprises sets of glycine and serine repeats such as (Gly₄Ser)n, where n is a positive integer equal to or greater than 1 (SEQ ID NO: 25). In some embodiments, the linker can be (Gly₄Ser)₄ (SEQ ID NO: 27) or (Gly₄Ser)₃(SEQ ID NO: 28). Variation in the linker length may retain or enhance activity, giving rise to superior efficacy in activity studies.

### CD20 CAR

[0641] In some embodiments, the CAR-expressing cell described herein is a CD20 CAR-expressing cell (for example, a cell expressing a CAR that binds to human CD20). In some embodiments, the CD20 CAR-expressing cell includes an antigen binding domain according to WO2016164731 and WO2018067992, incorporated herein by reference. Exemplary CD20-binding sequences or CD20 CAR sequences are disclosed in, for example, Tables 1-5 of WO2018067992. In some embodiments, the CD20 CAR comprises a CDR, variable region, scFv, or full-length sequence of a CD20 CAR disclosed in WO2018067992 or WO2016164731.

### CD22 CAR

[0642] In some embodiments, the CAR-expressing cell described herein is a CD22 CAR-expressing cell (for example, a cell expressing a CAR that binds to human CD22). In some embodiments, the CD22 CAR-expressing cell includes an antigen binding domain according to WO2016164731 and WO2018067992, incorporated herein by reference. Exemplary CD22-binding sequences or CD22 CAR sequences are disclosed in, for example, Tables 6A, 6B, 7A, 7B, 7C, 8A, 8B, 9A, 9B, 10A, and 10B of WO2016164731 and Tables 6-10 of WO2018067992. In some embodiments, the CD22 CAR sequences comprise a CDR, variable region, scFv or full-length sequence of a CD22 CAR disclosed in WO2018067992 or WO2016164731.

[0643] In embodiments, the CAR molecule comprises an antigen binding domain that binds to CD22 (CD22 CAR). In some embodiments, the antigen binding domain targets human CD22. In some embodiments, the antigen binding domain includes a single chain Fv sequence as described herein.

[0644] The sequences of human CD22 CAR are provided below. In some embodiments, a human CD22 CAR is CAR22-65.

[0645] Human CD22 CAR scFv sequence

EVQLQQSGPGLVKPSQTLSLTCAISGDSMLSNSDTWNWIRQSPSRGLEWL
GRTYHRSTWYDDYASSVRGRVSINVDTSKNQYSLQLNAVTPEDTGVYYCA
RVRLQDGNSWSDAFDVWGQGTMVTVSSGGGGSGGGGSGGGGSQSALTQPA
SASGSPGQSVTISCTGTSSDVGGYNYVSWYQQHPGKAPKLMIYDVSNRPS
GVSNRFSGSKSGNTASLTISGLQAEDEADYYCSSYTSSSTLYVFGTGTQL
TVL (SEQ ID NO: 285)

[0646] Human CD22 CAR heavy chain variable region

EVQLQQSGPGLVKPSQTLSLTCAISGDSMLSNSDTWNWIRQSPSRGLEWL
GRTYHRSTWYDDYASSVRGRVSINVDTSKNQYSLQLNAVTPEDTGVYYCA
RVRLQDGNSWSDAFDVWGQGTMVTVSS (SEQ ID NO 286)

[0647] Human CD22 CAR light chain variable region

QSALTQPASASGSPGQSVTISCTGTSSDVGGYNYVSWYQQHPGKAPKLMI
YDVSNRPSGVSNRFSGSKSGNTASLTISGLQAEDEADYYCSSYTSSSTLY
VFGTGTQLTVL (SEQ ID NO 287)

TABLE 16

Heavy Chain Variable Domain CDRs of CD22 CAR (CAR22-65)

| Candidate | HCDR1 | SEQ ID NO: | HCDR2 | SEQ ID NO: | HCDR3 | SEQ ID NO: |
|---|---|---|---|---|---|---|
| CAR22-65 Combined | GDSMLSNSDTWN | 288 | RTYHRSTWYDDYASSVRG | 290 | VRLQDGNSWSDAFDV | 291 |
| CAR22-65 Kabat | SNSDTWN | 289 | RTYHRSTWYDDYASSVRG | 290 | VRLQDGNSWSDAFDV | 291 |

TABLE 17

Light Chain Variable Domain CDRs of CD22 CAR (CAR22-65). The LC CDR sequences in this table have the same sequence under the Kabat or combined definitions

| Candidate | LCDR1 | SEQ ID NO: | LCDR2 | SEQ ID NO: | LCDR3 | SEQ ID NO: |
|---|---|---|---|---|---|---|
| CAR22-65 Combined | TGTSSDVGGYNYVS | 95 | DVSNRPS | 96 | SSYTSSSTLYV | 97 |

[0648] In some embodiments, the antigen binding domain comprises a HC CDR1, a HC CDR2, and a HC CDR3 of any heavy chain binding domain amino acid sequences listed in Table 16. In embodiments, the antigen binding domain further comprises a LC CDR1, a LC CDR2, and a LC CDR3. In embodiments, the antigen binding domain comprises a LC CDR1, a LC CDR2, and a LC CDR3 amino acid sequences listed in Table 17.

[0649] In some embodiments, the antigen binding domain comprises one, two or all of LC CDR1, LC CDR2, and LC CDR3 of any light chain binding domain amino acid sequences listed in Table 17, and one, two or all of HC CDR1, HC CDR2, and HC CDR3 of any heavy chain binding domain amino acid sequences listed in Table 16.

[0650] In some embodiments, the CDRs are defined according to the Kabat numbering scheme, the Chothia numbering scheme, or a combination thereof.

[0651] The order in which the VL and VH domains appear in the scFv can be varied (i.e., VL-VH, or VH-VL orientation), and where any of one, two, three or four copies of the “G4S” subunit (SEQ ID NO: 25), in which each subunit comprises the sequence GGGGS (SEQ ID NO: 25) (for example, (G4S)₃ (SEQ ID NO: 28) or (G4S)₄ (SEQ ID NO: 27)), can connect the variable domains to create the entirety of the scFv domain. Alternatively, the CAR construct can include, for example, a linker including the sequence GSTSGSGKPGSGEGSTKG (SEQ ID NO: 43). Alternatively, the CAR construct can include, for example, a linker including the sequence LAEAAAK (SEQ ID NO: 308). In some embodiments, the CAR construct does not include a linker between the VL and VH domains.

[0652] These clones all contained a Q/K residue change in the signal domain of the co-stimulatory domain derived from CD3zeta chain.

### EGFR CAR

[0653] In some embodiments, the CAR-expressing cell described herein is an EGFR CAR-expressing cell (for example, a cell expressing a CAR that binds to human EGFR). In some embodiments, the CAR-expressing cell described herein is an EGFRvIII CAR-expressing cell (for example, a cell expressing a CAR that binds to human EGFRvIII). Exemplary EGFRvIII CARs can include sequences disclosed in WO2014/130657, for example, Table 2 of WO2014/130657, incorporated herein by reference.

[0654] Exemplary EGFRvIII-binding sequences or EGFR CAR sequences may comprise a CDR, a variable region, an scFv, or a full-length CAR sequence of a EGFR CAR disclosed in WO2014/130657.

### Mesothelin CAR

[0655] In some embodiments, the CAR-expressing cell described herein is a mesothelin CAR-expressing cell (for example, a cell expressing a CAR that binds to human mesothelin). Exemplary mesothelin CARs can include sequences disclosed in WO2015090230 and WO2017112741, for example, Tables 2, 3, 4, and 5 of WO2017112741, incorporated herein by reference.

### Other Exemplary CARs

[0656] In other embodiments, the CAR-expressing cells can specifically bind to CD123, for example, can include a CAR molecule (for example, any of the CAR1 to CAR8), or an antigen binding domain according to Tables 1-2 of WO 2014/130635, incorporated herein by reference. The amino acid and nucleotide sequences encoding the CD123 CAR molecules and antigen binding domains (for example, including one, two, three VH CDRs; and one, two, three VL CDRs according to Kabat or Chothia), are specified in WO 2014/130635. In other embodiments, the CAR-expressing cells can specifically bind to CD123, for example, can include a CAR molecule (for example, any of the CAR123-1 to CAR123-4 and hzCAR123-1 to hzCAR123-32), or an antigen binding domain according to Tables 2, 6, and 9 of WO2016/028896, incorporated herein by reference. The amino acid and nucleotide sequences encoding the CD123 CAR molecules and antigen binding domains (for example, including one, two, three VH CDRs; and one, two, three VL CDRs according to Kabat or Chothia), are specified in WO2016/028896.

[0657] In some embodiments, the CAR molecule comprises a CLL1 CAR described herein, for example, a CLL1 CAR described in US2016/0051651A1, incorporated herein by reference. In embodiments, the CLL1 CAR comprises an amino acid, or has a nucleotide sequence shown in US2016/0051651A1, incorporated herein by reference. In other embodiments, the CAR-expressing cells can specifically bind to CLL-1, for example, can include a CAR molecule, or an antigen binding domain according to Table 2 of WO2016/014535, incorporated herein by reference. The amino acid and nucleotide sequences encoding the CLL-1 CAR molecules and antigen binding domains (for example, including one, two, three VH CDRs; and one, two, three VL CDRs according to Kabat or Chothia), are specified in WO2016/014535.

[0658] In some embodiments, the CAR molecule comprises a CD33 CAR described herein, e.ga CD33 CAR described in US2016/0096892A1, incorporated herein by reference. In embodiments, the CD33 CAR comprises an amino acid, or has a nucleotide sequence shown in US2016/0096892A1, incorporated herein by reference. In other embodiments, the CAR-expressing cells can specifically bind to CD33, for example, can include a CAR molecule (for example, any of CAR33-1 to CAR-33-9), or an antigen binding domain according to Table 2 or 9 of WO2016/014576, incorporated herein by reference. The amino acid and nucleotide sequences encoding the CD33 CAR molecules and antigen binding domains (for example, including one, two, three VH CDRs; and one, two, three VL CDRs according to Kabat or Chothia), are specified in WO2016/014576.

[0659] In some embodiments, the antigen binding domain comprises one, two three (for example, all three) heavy chain CDRs, HC CDR1, HC CDR2 and HC CDR3, from an antibody described herein (for example, an antibody described in WO2015/142675, US-2015-0283178- A1, US-2016-0046724-A1, US2014/0322212A1, US2016/0068601A1, US2016/0051651A1, US2016/0096892A1, US2014/0322275A1, or WO2015/090230, incorporated herein by reference), and/or one, two, three (for example, all three) light chain CDRs, LC CDR1, LC CDR2 and LC CDR3, from an antibody described herein (for example, an antibody described in WO2015/142675, US-2015-0283178-A1, US-2016-0046724-A1, US2014/0322212A1, US2016/0068601A1, US2016/0051651A1, US2016/0096892A1, US2014/0322275A1, or WO2015/090230, incorporated herein by reference). In some embodiments, the antigen binding domain comprises a heavy chain variable region and/or a variable light chain region of an antibody listed above.

[0660] In embodiments, the antigen binding domain is an antigen binding domain described in WO2015/142675, US-2015-0283178-A1, US-2016-0046724-A1, US2014/0322212A1, US2016/0068601A1, US2016/0051651A1, US2016/0096892A1, US2014/0322275A1, or WO2015/090230, incorporated herein by reference.

[0661] In embodiments, the antigen binding domain targets BCMA and is described in US- 2016-0046724-A1. In embodiments, the antigen binding domain targets CD19 and is described in US-2015-0283178-A1. In embodiments, the antigen binding domain targets CD123 and is described in US2014/0322212A1, US2016/0068601A1. In embodiments, the antigen binding domain targets CLL1 and is described in US2016/0051651A1. In embodiments, the antigen binding domain targets CD33 and is described in US2016/0096892A1.

[0662] Exemplary target antigens that can be targeted using the CAR-expressing cells, include, but are not limited to, CD19, CD123, EGFRvIII, CD33, mesothelin, BCMA, and GFR ALPHA-4, among others, as described in, for example, WO2014/153270, WO 2014/130635, WO2016/028896, WO 2014/130657, WO2016/014576, WO 2015/090230, WO2016/014565, WO2016/014535, and WO2016/025880, each of which is herein incorporated by reference in its entirety.

[0663] In other embodiments, the CAR-expressing cells can specifically bind to GFR ALPHA-4, for example, can include a CAR molecule, or an antigen binding domain according to Table 2 of WO2016/025880, incorporated herein by reference. The amino acid and nucleotide sequences encoding the GFR ALPHA-4 CAR molecules and antigen binding domains (for example, including one, two, three VH CDRs; and one, two, three VL CDRs according to Kabat or Chothia), are specified in WO2016/025880.

[0664] In some embodiments, the antigen binding domain of any of the CAR molecules described herein (for example, any of CD19, CD123, EGFRvIII, CD33, mesothelin, BCMA, and GFR ALPHA-4) comprises one, two three (for example, all three) heavy chain CDRs, HC CDR1, HC CDR2 and HC CDR3, from an antibody listed above, and/or one, two, three (for example, all three) light chain CDRs, LC CDR1, LC CDR2 and LC CDR3, from an antigen binding domain listed above. In some embodiments, the antigen binding domain comprises a heavy chain variable region and/or a variable light chain region of an antibody listed or described above.

[0665] In some embodiments, the antigen binding domain comprises one, two three (for example, all three) heavy chain CDRs, HC CDR1, HC CDR2 and HC CDR3, from an antibody listed above, and/or one, two, three (for example, all three) light chain CDRs, LC CDR1, LC CDR2 and LC CDR3, from an antibody listed above. In some embodiments, the antigen binding domain comprises a heavy chain variable region and/or a variable light chain region of an antibody listed or described above.

[0666] In some embodiments, the tumor antigen is a tumor antigen described in International Application WO2015/142675, filed Mar. 13, 2015, which is herein incorporated by reference in its entirety. In some embodiments, the tumor antigen is chosen from one or more of: CD19; CD123; CD22; CD30; CD171; CS-1 (also referred to as CD2 subset 1, CRACC, SLAMF7, CD319, and 19A24); C-type lectin-like molecule-1 (CLL-1 or CLECL1); CD33; epidermal growth factor receptor variant III (EGFRvIII); ganglioside G2 (GD2); ganglioside GD3 (aNeu5Ac(2-8)aNeu5Ac(2-3)bDGalp(1-4)bDGlcp(1-1)Cer); TNF receptor family member B cell maturation (BCMA); Tn antigen ((Tn Ag) or (GalNAcα-Ser/Thr)); prostate-specific membrane antigen (PSMA); Receptor tyrosine kinase-like orphan receptor 1 (ROR1); Fms-Like Tyrosine Kinase 3 (FLT3); Tumor-associated glycoprotein 72 (TAG72); CD38; CD44v6; Carcinoembryonic antigen (CEA); Epithelial cell adhesion molecule (EPCAM); B7H3 (CD276); KIT (CD117); Interleukin-13 receptor subunit alpha-2 (IL-13Ra2 or CD213A2); Mesothelin; Interleukin 11 receptor alpha (IL-11Ra); prostate stem cell antigen (PSCA); Protease Serine 21 (Testisin or PRSS21); vascular endothelial growth factor receptor 2 (VEGFR2); Lewis(Y) antigen; CD24; Platelet-derived growth factor receptor beta (PDGFR-beta); Stage-specific embryonic antigen-4 (SSEA-4); CD20; Folate receptor alpha; Receptor tyrosine-protein kinase ERBB2 (Her2/neu); Mucin 1, cell surface associated (MUC1); epidermal growth factor receptor (EGFR); neural cell adhesion molecule (NCAM); Prostase; prostatic acid phosphatase (PAP); elongation factor 2 mutated (ELF2M); Ephrin B2; fibroblast activation protein alpha (FAP); insulin-like growth factor 1 receptor (IGF-I receptor), carbonic anhydrase IX (CAIX); Proteasome (Prosome, Macropain) Subunit, Beta Type, 9 (LMP2); glycoprotein 100 (gp100); oncogene fusion protein consisting of breakpoint cluster region (BCR) and Abelson murine leukemia viral oncogene homolog 1 (Abl) (bcr-abl); tyrosinase; ephrin type-A receptor 2 (EphA2); Fucosyl GM1; sialyl Lewis adhesion molecule (sLe); ganglioside GM3 (aNeu5Ac(2-3)bDGalp(1-4)bDGlcp(1-1)Cer); transglutaminase 5 (TGS5); high molecular weight-melanoma-associated antigen (HMWMAA); o-acetyl-GD2 ganglioside (OAcGD2); Folate receptor beta; tumor endothelial marker 1 (TEM1/CD248); tumor endothelial marker 7-related (TEM7R); claudin 6 (CLDN6); thyroid stimulating hormone receptor (TSHR); G protein-coupled receptor class C group 5, member D (GPRC5D); chromosome X open reading frame 61 (CXORF61); CD97; CD179a; anaplastic lymphoma kinase (ALK); Polysialic acid; placenta-specific 1 (PLAC1); hexasaccharide portion of globoH glycoceramide (GloboH); mammary gland differentiation antigen (NY-BR-1); uroplakin 2 (UPK2); Hepatitis A virus cellular receptor 1 (HAVCR1); adrenoceptor beta 3 (ADRB3); pannexin 3 (PANX3); G protein-coupled receptor 20 (GPR20); lymphocyte antigen 6 complex, locus K 9 (LY6K); Olfactory receptor 51E2 (OR51E2); TCR Gamma Alternate Reading Frame Protein (TARP); Wilms tumor protein (WT1); Cancer/testis antigen 1 (NY-ESO-1); Cancer/testis antigen 2 (LAGE-1a); Melanoma-associated antigen 1 (MAGE-A1); ETS translocation-variant gene 6, located on chromosome 12p (ETV6-AML); sperm protein 17 (SPA17); X Antigen Family, Member 1A (XAGE1); angiopoietin-binding cell surface receptor 2 (Tie 2); melanoma cancer testis antigen-1 (MAD-CT-1); melanoma cancer testis antigen-2 (MAD-CT-2); Fos-related antigen 1; tumor protein p53 (p53); p53 mutant; prostein; surviving; telomerase; prostate carcinoma tumor antigen-1 (PCTA-1 or Galectin 8), melanoma antigen recognized by T cells 1 (MelanA or MART1); Rat sarcoma (Ras) mutant; human Telomerase reverse transcriptase (hTERT); sarcoma translocation breakpoints; melanoma inhibitor of apoptosis (ML-IAP); ERG (transmembrane protease, serine 2 (TMPRSS2) ETS fusion gene); N-Acetyl glucosaminyl-transferase V (NA17); paired box protein Pax-3 (PAX3); Androgen receptor; Cyclin B1; v-myc avian myelocytomatosis viral oncogene neuroblastoma derived homolog (MYCN); Ras Homolog Family Member C (RhoC); Tyrosinase-related protein 2 (TRP-2); Cytochrome P450 1B1 (CYP1B1); CCCTC-Binding Factor (Zinc Finger Protein)-Like (BORIS or Brother of the Regulator of Imprinted Sites), Squamous Cell Carcinoma Antigen Recognized By T Cells 3 (SART3); Paired box protein Pax-5 (PAX5); proacrosin binding protein sp32 (OY-TES1); lymphocyte-specific protein tyrosine kinase (LCK); A kinase anchor protein 4 (AKAP-4); synovial sarcoma, X breakpoint 2 (SSX2); Receptor for Advanced Glycation Endproducts (RAGE-1); renal ubiquitous 1 (RU1); renal ubiquitous 2 (RU2); legumain; human papilloma virus E6 (HPV E6); human papilloma virus E7 (HPV E7); intestinal carboxyl esterase; heat shock protein 70-2 mutated (mut hsp70-2); CD79a; CD79b; CD72; Leukocyte-associated immunoglobulin-like receptor 1 (LAIR1); Fc fragment of IgA receptor (FCAR or CD89); Leukocyte immunoglobulin-like receptor subfamily A member 2 (LILRA2); CD300 molecule-like family member f (CD300LF); C-type lectin domain family 12 member A (CLEC12A); bone marrow stromal cell antigen 2 (BST2); EGF-like module-containing mucin-like hormone receptor-like 2 (EMR2); lymphocyte antigen 75 (LY75); Glypican-3 (GPC3); Fc receptor-like 5 (FCRL5); and immunoglobulin lambda-like polypeptide 1 (IGLL1).

[0667] In some embodiments, the antigen binding domain comprises one, two three (for example, all three) heavy chain CDRs, HC CDR1, HC CDR2 and HC CDR3, from an antibody listed above, and/or one, two, three (for example, all three) light chain CDRs, LC CDR1, LC CDR2 and LC CDR3, from an antibody listed above. In some embodiments, the antigen binding domain comprises a heavy chain variable region and/or a variable light chain region of an antibody listed or described above.

[0668] In some embodiments, the anti-tumor antigen binding domain is a fragment, for example, a single chain variable fragment (scFv). In some embodiments, the anti-a cancer associate antigen as described herein binding domain is a Fv, a Fab, a (Fab′)2, or a bi-functional (for example bi-specific) hybrid antibody (for example, Lanzavecchia et al., Eur. J. Immunol. 17, 105 (1987)). In some embodiments, the antibodies and fragments thereof of the invention binds a cancer associate antigen as described herein protein with wild-type or enhanced affinity.

[0669] In some instances, scFvs can be prepared according to a method known in the art (see, for example, Bird et al., (1988) Science 242:423-426 and Huston et al., (1988) Proc. Natl. Acad. Sci. USA 85:5879-5883). ScFv molecules can be produced by linking VH and VL regions together using flexible polypeptide linkers. The scFv molecules comprise a linker (for example, a Ser-Gly linker) with an optimized length and/or amino acid composition. The linker length can greatly affect how the variable regions of a scFv fold and interact. In fact, if a short polypeptide linker is employed (for example, between 5-10 amino acids) intrachain folding is prevented. Interchain folding is also required to bring the two variable regions together to form a functional epitope binding site. For examples of linker orientation and size see, for example, Hollinger et al. 1993 Proc Natl Acad. Sci. U.S.A. 90:6444-6448, U.S. Pat. Application Publication Nos. 2005/0100543, 2005/0175606, 2007/0014794, and PCT publication Nos. WO2006/020258 and WO2007/024715, which are incorporated herein by reference.

[0670] An scFv can comprise a linker of at least 1, 2, 3, 4, 5, 6, 7, 8, 9, 10, 11, 12, 13, 14, 15, 16, 17, 18, 19, 20, 25, 30, 35, 40, 45, 50, or more amino acid residues between its VL and VH regions. The linker sequence may comprise any naturally occurring amino acid. In some embodiments, the linker sequence comprises amino acids glycine and serine. In some embodiments, the linker sequence comprises sets of glycine and serine repeats such as (Gly₄Ser)n, where n is a positive integer equal to or greater than 1 (SEQ ID NO: 25). In some embodiments, the linker can be (Gly₄Ser)₄ (SEQ ID NO: 27) or (Gly₄Ser)₃(SEQ ID NO: 28). Variation in the linker length may retain or enhance activity, giving rise to superior efficacy in activity studies.

[0671] In some embodiments, the antigen binding domain is a T cell receptor (“TCR”), or a fragment thereof, for example, a single chain TCR (scTCR). Methods to make such TCRs are known in the art. See, for example, Willemsen RA et al, Gene Therapy 7: 1369-1377 (2000); Zhang T et al, Cancer Gene Ther 11: 487-496 (2004); Aggen et al, Gene Ther. 19(4):365-74 (2012) (references are incorporated herein by its entirety). For example, scTCR can be engineered that contains the Vα and Vβ genes from a T cell clone linked by a linker (for example, a flexible peptide). This approach is very useful to cancer associated target that itself is intracellular, however, a fragment of such antigen (peptide) is presented on the surface of the cancer cells by MHC.

### Transmembrane Domain

[0672] With respect to the transmembrane domain, in various embodiments, a CAR can be designed to comprise a transmembrane domain that is attached to the extracellular domain of the CAR. A transmembrane domain can include one or more additional amino acids adjacent to the transmembrane region, for example, one or more amino acid associated with the extracellular region of the protein from which the transmembrane was derived (for example, 1, 2, 3, 4, 5, 6, 7, 8, 9, 10 up to 15 amino acids of the extracellular region) and/or one or more additional amino acids associated with the intracellular region of the protein from which the transmembrane protein is derived (for example, 1, 2, 3, 4, 5, 6, 7, 8, 9, 10 up to 15 amino acids of the intracellular region). In some embodiments, the transmembrane domain is one that is associated with one of the other domains of the CAR is used. In some instances, the transmembrane domain can be selected or modified by amino acid substitution to avoid binding of such domains to the transmembrane domains of the same or different surface membrane proteins, for example, to minimize interactions with other members of the receptor complex. In some embodiments, the transmembrane domain is capable of homodimerization with another CAR on the CAR-expressing cell, for example, CART cell, surface. In some embodiments the amino acid sequence of the transmembrane domain may be modified or substituted so as to minimize interactions with the binding domains of the native binding partner present in the same CAR-expressing cell, for example, CART.

[0673] The transmembrane domain may be derived either from a natural or from a recombinant source. Where the source is natural, the domain may be derived from any membrane-bound or transmembrane protein. In some embodiments the transmembrane domain is capable of signaling to the intracellular domain(s) whenever the CAR has bound to a target. A transmembrane domain of particular use in this invention may include at least the transmembrane region(s) of, for example, the alpha, beta or zeta chain of T-cell receptor, CD28, CD3 epsilon, CD45, CD4, CD5, CD8 (for example, CD8 alpha, CD8 beta), CD9, CD16, CD22, CD33, CD37, CD64, CD80, CD86, CD134, CD137, CD154. In some embodiments, a transmembrane domain may include at least the transmembrane region(s) of a costimulatory molecule, for example, MHC class I molecule, TNF receptor proteins, Immunoglobulin-like proteins, cytokine receptors, integrins, signaling lymphocytic activation molecules (SLAM proteins), activating NK cell receptors, BTLA, a Toll ligand receptor, OX40, CD2, CD7, CD27, CD28, CD30, CD40, CDS, ICAM-1, LFA-1 (CD11a/CD18), 4-1BB (CD137), B7-H3, CDS, ICAM-1, ICOS (CD278), GITR, BAFFR, LIGHT, HVEM (LIGHTR), KIRDS2, SLAMF7, NKp80 (KLRF1), NKp44, NKp30, NKp46, CD19, CD4, CD8alpha, CD8beta, IL2R beta, IL2R gamma, IL7R alpha, ITGA4, VLA1, CD49a, ITGA4, IA4, CD49D, ITGA6, VLA-6, CD49f, ITGAD, CD11d, ITGAE, CD103, ITGAL, CD11a, LFA-1, ITGAM, CD11b, ITGAX, CD11c, ITGB1, CD29, ITGB2, CD18, LFA-1, ITGB7, NKG2D, NKG2C, TNFR2, TRANCE/RANKL, DNAM1 (CD226), SLAMF4 (CD244, 2B4), CD84, CD96 (Tactile), CEACAM1, CRTAM, Ly9 (CD229), CD160 (BY55), PSGL1, CD100 (SEMA4D), CD69, SLAMF6 (NTB-A, Ly108), SLAM (SLAMF1, CD150, IPO-3), BLAME (SLAMF8), SELPLG (CD162), LTBR, LAT, GADS, SLP-76, PAG/Cbp, CD19a, and a ligand that specifically binds with CD83.

[0674] In some instances, the transmembrane domain can be attached to the extracellular region of the CAR, for example, the antigen binding domain of the CAR, via a hinge, for example, a hinge from a human protein. For example, in some embodiments, the hinge can be a human Ig (immunoglobulin) hinge, for example, an IgG4 hinge, or a CD8a hinge. In some embodiments, the hinge or spacer comprises (for example, consists of) the amino acid sequence of SEQ ID NO: 2. In some embodiments, the transmembrane domain comprises (for example, consists of) a transmembrane domain of SEQ ID NO: 6.

[0675] In some embodiments, the hinge or spacer comprises an IgG4 hinge. For example, in some embodiments, the hinge or spacer comprises a hinge of SEQ ID NO: 3. In some embodiments, the hinge or spacer comprises a hinge encoded by the nucleotide sequence of SEQ ID NO: 14.

[0676] In some embodiments, the hinge or spacer comprises an IgD hinge. For example, in some embodiments, the hinge or spacer comprises a hinge of the amino acid sequence of SEQ ID NO: 4. In some embodiments, the hinge or spacer comprises a hinge encoded by the nucleotide sequence of SEQ ID NO: 15.

[0677] In some embodiments, the transmembrane domain may be recombinant, in which case it will comprise predominantly hydrophobic residues such as leucine and valine. In some embodiments, a triplet of phenylalanine, tryptophan and valine can be found at each end of a recombinant transmembrane domain.

[0678] Optionally, a short oligo- or polypeptide linker, between 2 and 10 amino acids in length may form the linkage between the transmembrane domain and the cytoplasmic region of the CAR. A glycine-serine doublet provides a particularly suitable linker. For example, in some embodiments, the linker comprises the amino acid sequence of SEQ ID NO: 5. In some embodiments, the linker is encoded by a nucleotide sequence of SEQ ID NO: 16.

[0679] In some embodiments, the hinge or spacer comprises a KIR2DS2 hinge.

### Cytoplasmic Domain

[0680] The cytoplasmic domain or region of a CAR of the present invention includes an intracellular signaling domain. An intracellular signaling domain is generally responsible for activation of at least one of the normal effector functions of the immune cell in which the CAR has been introduced.

[0681] Examples of intracellular signaling domains for use in the CAR of the invention include the cytoplasmic sequences of the T cell receptor (TCR) and co-receptors that act in concert to initiate signal transduction following antigen receptor engagement, as well as any derivative or variant of these sequences and any recombinant sequence that has the same functional capability.

[0682] It is known that signals generated through the TCR alone are insufficient for full activation of the T cell and that a secondary and/or costimulatory signal is also required. Thus, T cell activation can be said to be mediated by two distinct classes of cytoplasmic signaling sequences: those that initiate antigen-dependent primary activation through the TCR (primary intracellular signaling domains) and those that act in an antigen-independent manner to provide a secondary or costimulatory signal (secondary cytoplasmic domain, for example, a costimulatory domain).

[0683] A primary signaling domain regulates primary activation of the TCR complex either in a stimulatory way, or in an inhibitory way. Primary intracellular signaling domains that act in a stimulatory manner may contain signaling motifs which are known as immunoreceptor tyrosine-based activation motifs or ITAMs.

[0684] Examples of ITAM containing primary intracellular signaling domains that are of particular use in the invention include those of TCR zeta, FcR gamma, FcR beta, CD3 gamma, CD3 delta, CD3 epsilon, CD5, CD22, CD79a, CD79b, CD278 (also known as “ICOS”), FcεRI, DAP10, DAP12, and CD66d. In some embodiments, a CAR of the invention comprises an intracellular signaling domain, for example, a primary signaling domain of CD3-zeta.

[0685] In some embodiments, a primary signaling domain comprises a modified ITAM domain, for example, a mutated ITAM domain which has altered (for example, increased or decreased) activity as compared to the native ITAM domain. In some embodiments, a primary signaling domain comprises a modified ITAM-containing primary intracellular signaling domain, for example, an optimized and/or truncated ITAM-containing primary intracellular signaling domain. In some embodiments, a primary signaling domain comprises one, two, three, four or more ITAM motifs.

[0686] Further examples of molecules containing a primary intracellular signaling domain that are of particular use in the invention include those of DAP10, DAP12, and CD32.

[0687] The intracellular signaling domain of the CAR can comprise the primary signaling domain, for example, CD3-zeta signaling domain, by itself or it can be combined with any other desired intracellular signaling domain(s) useful in the context of a CAR of the invention. For example, the intracellular signaling domain of the CAR can comprise a primary signaling domain, for example, CD3 zeta chain portion, and a costimulatory signaling domain. The costimulatory signaling domain refers to a portion of the CAR comprising the intracellular domain of a costimulatory molecule. A costimulatory molecule is a cell surface molecule other than an antigen receptor or its ligands that is required for an efficient response of lymphocytes to an antigen. Examples of such molecules include MHC class I molecule, TNF receptor proteins, Immunoglobulin-like proteins, cytokine receptors, integrins, signaling lymphocytic activation molecules (SLAM proteins), activating NK cell receptors, BTLA, a Toll ligand receptor, OX40, CD2, CD7, CD27, CD28, CD30, CD40, CDS, ICAM-1, LFA-1 (CD11a/CD18), 4-1BB (CD137), B7-H3, CDS, ICAM-1, ICOS (CD278), GITR, BAFFR, LIGHT, HVEM (LIGHTR), KIRDS2, SLAMF7, NKp80 (KLRF1), NKp44, NKp30, NKp46, CD19, CD4, CD8alpha, CD8beta, IL2R beta, IL2R gamma, IL7R alpha, ITGA4, VLA1, CD49a, ITGA4, IA4, CD49D, ITGA6, VLA-6, CD49f, ITGAD, CD11d, ITGAE, CD103, ITGAL, CD11a, LFA-1, ITGAM, CD11b, ITGAX, CD11c, ITGB1, CD29, ITGB2, CD18, LFA-1, ITGB7, NKG2D, NKG2C, TNFR2, TRANCE/RANKL, DNAM1 (CD226), SLAMF4 (CD244, 2B4), CD84, CD96 (Tactile), CEACAM1, CRTAM, Ly9 (CD229), CD160 (BY55), PSGL1, CD100 (SEMA4D), CD69, SLAMF6 (NTB-A, Ly108), SLAM (SLAMF1, CD150, IPO-3), BLAME (SLAMF8), SELPLG (CD162), LTBR, LAT, GADS, SLP-76, PAG/Cbp, CD19a, and a ligand that specifically binds with CD83, and the like. For example, CD27 costimulation has been demonstrated to enhance expansion, effector function, and survival of human CART cells in vitro and augments human T cell persistence and antitumor activity in vivo (Song et al. Blood. 2012; 119(3):696-706). The intracellular signaling sequences within the cytoplasmic portion of the CAR of the invention may be linked to each other in a random or specified order. Optionally, a short oligo- or polypeptide linker, for example, between 2 and 10 amino acids (for example, 2, 3, 4, 5, 6, 7, 8, 9, or 10 amino acids) in length may form the linkage between intracellular signaling sequence. In some embodiments, a glycine-serine doublet can be used as a suitable linker. In some embodiments, a single amino acid, for example, an alanine, a glycine, can be used as a suitable linker.

[0688] In some embodiments, the intracellular signaling domain is designed to comprise two or more, for example, 2, 3, 4, 5, or more, costimulatory signaling domains. In some embodiments, the two or more, for example, 2, 3, 4, 5, or more, costimulatory signaling domains, are separated by a linker molecule, for example, a linker molecule described herein. In some embodiments, the intracellular signaling domain comprises two costimulatory signaling domains. In some embodiments, the linker molecule is a glycine residue. In some embodiments, the linker is an alanine residue.

[0689] In some embodiments, the intracellular signaling domain is designed to comprise the signaling domain of CD3-zeta and the signaling domain of CD28. In some embodiments, the intracellular signaling domain is designed to comprise the signaling domain of CD3-zeta and the signaling domain of 4-1BB. In some embodiments, the signaling domain of 4-1BB is a signaling domain of SEQ ID NO: 7. In some embodiments, the signaling domain of CD3-zeta is a signaling domain of SEQ ID NO: 9 (mutant CD3zeta) or SEQ ID NO: 10 (wild type human CD3zeta).

[0690] In some embodiments, the intracellular signaling domain is designed to comprise the signaling domain of CD3-zeta and the signaling domain of CD27. In some embodiments, the signaling domain of CD27 comprises the amino acid sequence of SEQ ID NO: 8. In some embodiments, the signaling domain of CD27 is encoded by the nucleic acid sequence of SEQ ID NO: 19.

[0691] In some embodiments, the intracellular is designed to comprise the signaling domain of CD3-zeta and the signaling domain of CD28. In some embodiments, the signaling domain of CD28 comprises the amino acid sequence of SEQ ID NO: 36. In some embodiments, the signaling domain of CD28 is encoded by the nucleic acid sequence of SEQ ID NO: 37.

[0692] In some embodiments, the intracellular is designed to comprise the signaling domain of CD3-zeta and the signaling domain of ICOS. In some embodiments, the signaling domain of ICOS comprises the amino acid sequence of SEQ ID NO: 38. In some embodiments, the signaling domain of ICOS is encoded by the nucleic acid sequence of SEQ ID NO: 39.

### Co-Expression of CAR With Other Molecules or Agents Co-Expression of a Second CAR

[0693] In some embodiments, the CAR-expressing cell described herein can further comprise a second CAR, for example, a second CAR that includes a different antigen binding domain, for example, to the same target (for example, CD19) or a different target (for example, a target other than CD19, for example, a target described herein).

[0694] In some embodiments, the CAR-expressing cell described herein, e.g., the CAR-expressing cell manufactured using a method described herein, comprises (i) a first nucleic acid molecule encoding a first CAR that binds to BCMA and (ii) a second nucleic acid molecule encoding a second CAR that binds to CD19. In some embodiments, the first CAR comprises an anti-BCMA binding domain, a first transmembrane domain, and a first intracellular signaling domain, wherein the anti-BCMA binding domain comprises a heavy chain variable region (VH) comprising a heavy chain complementary determining region 1 (HC CDR1), a heavy chain complementary determining region 2 (HC CDR2), and a heavy chain complementary determining region 3 (HC CDR3), and a light chain variable region (VL) comprising a light chain complementary determining region 1 (LC CDR1), a light chain complementary determining region 2 (LC CDR2), and a light chain complementary determining region 3 (LC CDR3), wherein the HC CDR1, HC CDR2, HC CDR3, LC CDR1, LC CDR2, and LC CDR3 comprise the amino acid sequences of SEQ ID NOs: 86, 87, 88, 95, 96, and 97, respectively. In some embodiments, the second CAR comprises an anti-CD19 binding domain, a second transmembrane domain, and a second intracellular signaling domain, wherein the anti-CD19 binding domain comprises a VH comprising a HC CDR1, a HC CDR2, and a HC CDR3, and a VL comprising a LC CDR1, a LC CDR2, and a LC CDR3, wherein the HC CDR1, HC CDR2, HC CDR3, LC CDR1, LC CDR2, and LC CDR3 comprise the amino acid sequences of SEQ ID NOs: 295, 304, and 297-300, respectively. In some embodiments, (i) the VH and VL of the anti-BCMA binding domain comprise the amino acid sequences of SEQ ID NOs: 93 and 102, respectively. In some embodiments, the VH and VL of the anti-CD19 binding domain comprise the amino acid sequences of SEQ ID NOs: 250 and 251, respectively. In some embodiments, the anti-BCMA binding domain comprises the amino acid sequence of SEQ ID NO: 105. In some embodiments, the anti-CD19 binding domain comprises the amino acid sequence of SEQ ID NO: 293. In some embodiments, the first CAR comprises the amino acid sequence of SEQ ID NO: 107. In some embodiments, the second CAR comprise the amino acid sequence of SEQ ID NO: 225.

[0695] In some embodiments, the CAR-expressing cell described herein, e.g., the CAR-expressing cell manufactured using a method described herein, comprises (i) a first nucleic acid molecule encoding a first CAR that binds to CD22 and (ii) a second nucleic acid molecule encoding a second CAR that binds to CD19. In some embodiments, the CD22 CAR comprises a CD22 antigen binding domain, and a first transmembrane domain; a first co-stimulatory signaling domain; and/or a first primary signaling domain. In some embodiments, the CD19 CAR comprises a CD19 antigen binding domain, and a second transmembrane domain; a second co-stimulatory signaling domain; and/or a second primary signaling domain.

[0696] In some embodiments, the CD22 antigen binding domain comprises one or more (e.g., all three) light chain complementarity determining region 1 (LC CDR1), light chain complementarity determining region 2 (LC CDR2), and light chain complementarity determining region 3 (LC CDR3) of a CD22 binding domain described herein, e.g., in Tables 16, 17, 30, 31, or 32; and/or one or more (e.g., all three) heavy chain complementarity determining region 1 (HC CDR1), heavy chain complementarity determining region 2 (HC CDR2), and heavy chain complementarity determining region 3 (HC CDR3) of a CD22 binding domain described herein, e.g., in Tables 16, 17, 30, 31 or 32. In an embodiment, the CD22 antigen binding domain comprises a LC CDR1, LC CDR2 and LC CDR3 of a CD22 binding domain described herein, e.g., in Table 16, 17, 30, 31 or 33; and/or a HC CDR1, HC CDR2 and HC CDR3 of a CD22 binding domain described herein, e.g., in Tables 16, 17, 30, 31 or 33. In some embodiments, the CD19 antigen binding domain comprises: one or more (e.g., all three) LC CDR1, LC CDR2, and LC CDR3 of a CD19 binding domain described herein, e.g., in Tables 2, 30, 31, or 32; and/or one or more (e.g., all three) HC CDR1, HC CDR2, and HC CDR3 of a CD19 binding domain described herein, e.g., in Tables 2, 30, 31, and 32. In some embodiments, the CD19 antigen binding domain comprises a LC CDR1, LC CDR2 and LC CDR3 of a CD19 binding domain described herein, e.g., in Tables 2, 30, 31, and 32; and/or a HC CDR1, HC CDR2 and HC CDR3 of a CD19 binding domain described herein, e.g., in Tables 2, 30, 31, and 32.

[0697] In some embodiment, the CD22 antigen binding domain (e.g., an scFv) comprises a light chain variable (VL) region of a CD22 binding domain described herein, e.g., in Tables 30 or 32; and/or a heavy chain variable (VH) region of a CD22 binding domain described herein, e.g., in Tables 30 or 32. In some embodiments, the CD22 antigen binding domain comprises a VL region comprising an amino acid sequence having at least one, two or three modifications (e.g., substitutions) but not more than 30, 20 or 10 modifications (e.g., substitutions) of a CD22 VL region sequence provided in Table 30 or 32. In some embodiments, the CD22 antigen binding domain comprises a VL region comprising an amino acid sequence provided in Table 30 or 32, or a sequence having at least about 80%, 85%, 90%, 92%, 95%, 97%, 98%, or 99% sequence identity to any of the aforesaid sequences. In some embodiments, the CD22 antigen binding domain comprises a VH region comprising an amino acid sequence having at least one, two or three modifications (e.g., substitutions) but not more than 30, 20 or 10 modifications (e.g., substitutions) of a CD22 VH region sequence provided in Table 30 or 32. In some embodiments, the CD22 antigen binding domain comprises a VH region comprising the amino acid sequence of a CD22 VH region sequence provided in Table 30 or 32, or a sequence having at least about 80%, 85%, 90%, 92%, 95%, 97%, 98%, or 99% sequence identity to any of the aforesaid sequences. In some embodiments, the CD19 antigen binding domain (e.g., an scFv) comprises a VL region of a CD19 binding domain described herein, e.g., in Tables 2, 30, or 32; and/or a VH region of a CD19 binding domain described herein, e.g., in Tables 2, 30, or 32. In some embodiments, the CD19 antigen binding domain comprises a VL region comprising an amino acid sequence having at least one, two or three modifications (e.g., substitutions) but not more than 30, 20 or 10 modifications (e.g., substitutions) of a CD19 VL region sequence provided in Tables 2, 30, or 32. In some embodiments, the CD19 antigen binding domain comprises a VL region comprising the amino acid sequence of a CD19 VL region sequence provided in Tables 2, 30, or 32, or a sequence having at least about 80%, 85%, 90%, 92%, 95%, 97%, 98%, or 99% sequence identity to any of the aforesaid sequences. In some embodiments, the CD19 antigen binding domain comprises a VH region comprising an amino acid sequence having at least one, two or three modifications (e.g., substitutions) but not more than 30, 20 or 10 modifications (e.g., substitutions) of a CD19 VH region sequence provided in Tables 2, 30, or 32. In some embodiments, the CD19 antigen binding domain comprises a VH region comprising the amino acid sequence of a CD19 VH region sequence provided in Tables 2, 30, or 32, or a sequence having at least about 80%, 85%, 90%, 92%, 95%, 97%, 98%, or 99% sequence identity to any of the aforesaid sequences.

[0698] In some embodiments, the CD22 antigen binding comprises an scFv comprising an amino acid sequence having at least one, two or three modifications (e.g., substitutions) but not more than 30, 20 or 10 modifications (e.g., substitutions) of a CD22 scFv sequence provided in Table 30 or 32. In some embodiments, the CD22 antigen binding comprises an scFv comprising an amino acid sequence of a CD22 scFv sequence provided in Table 30 or 32, or a sequence having at least about 80%, 85%, 90%, 92%, 95%, 97%, 98%, or 99% sequence identity to any of the aforesaid sequences. In some embodiments, the CD19 antigen binding domain comprises an scFv comprising an amino acid sequence having at least one, two or three modifications (e.g., substitutions) but not more than 30, 20 or 10 modifications (e.g., substitutions) of a CD19 scFv sequence provided in Tables 2, 30, or 32. In some embodiments, the CD19 antigen binding domain comprises an scFv comprising the amino acid sequence of a CD19 scFv sequence provided in Tables 2, 30, or 32, or a sequence having at least about 80%, 85%, 90%, 92%, 95%, 97%, 98%, or 99% sequence identity to any of the aforesaid sequences.

[0699] In some embodiments, the CD22 CAR molecule and/or the CD19 CAR molecule comprises an additional component, e.g., a signal peptide, a hinge, a transmembrane domain, a co-stimulatory signaling domain and/or a first primary signaling domain, a P2A site, and/or a linker, comprising an amino acid sequence provided in Table 33, or a sequence having at least about 70%, 75%, 80%, 85%, 90%, 92%, 95%, 97%, 98%, or 99% sequence identity to any of the aforesaid sequences; or is encoded by a nucleotide sequence provided in Table 33, or a sequence having at least about 70%, 75%, 80%, 85%, 90%, 92%, 95%, 97%, 98%, or 99% sequence identity to any of the aforesaid sequences.

[0700] Exemplary nucleotide and amino acid sequences of a CAR molecule, e.g., a dual CAR molecule comprising (i) a first CAR that binds to CD22 and (ii) a second CAR that binds to CD19 disclosed herein, is provided in Table 30.

TABLE 30

Dual and tandem CD19-CD22 CAR sequences

| Identifier | SEQ ID NO | Sequence |
|---|---|---|
| Tandem CD19-CD22 CARs | | |
| CG#c171 | 725 | atggccctccctgtcaccgccctgctgcttccgctggctcttctgctccacgccgctcggcccgaaattgtgatgacccagtcacccgccactcttagcctttcacccggtgagcgcgcaaccctgtcttgcagagcctcccaagacatctcaaaataccttaattggtatcaacagaagcccggacaggctcctcgccttctgatctaccacaccagccggctccattctggaatccctgccaggttcagcggtagcggatctgggaccgactacaccctcactatcagctcactgcagccagaggacttcgctgtctatttctgtcagcaagggaacaccctgccctacacctttggacagggcaccaagctcgagattaaaggtggaggtggcagcggaggaggtgggtccggcggtggaggaagccaggtccaactccaagaaagcggaccgggtcttgtgaagccatcagaaactctttcactgacttgtactgtgagcggagtgtctctccccgattacggggtgtcttggatcagacagccaccggggaagggtctggaatggattggagtgatttggggctctgagactacttactaccaatcatccctcaagtcacgcgtcaccatctcaaaggacaactctaagaatcaggtgtcactgaaactgtcatctgtgaccgcagccgacaccgccgtgtactattgcgctaagcattactattatggcgggagctacgcaatggattactggggacagggtactctggtcaccgtgtccagcttggcagaagccgccgcgaaagaagtgcagcttcaacaatcaggaccaggactcgtcaaaccatcacagaccctctccctcacatgtgccatctccggggactccatgttgagcaattccgacacttggaattggattagacaaagcccgtcccggggtctggaatggttgggacgcacctaccaccggtctacttggtacgacgactacgcgtcatccgtgcggggaagagtgtccatcaacgtggacacctccaagaaccagtacagcctgcagcttaatgccgtgactcctgaggatacgggcgtctactactgcgcccgcgtccgcctgcaagacgggaacagctggagcgatgcattcgatgtctggggccagggaactatggtcaccgtgtcgtctgggggcggtggatcgggtggcgggggttcggggggcggcggctctcagtccgctcttacccaaccggcctcagcctcggggagccccggccagagcgtgaccatttcctgcaccggcacttcatccgacgtgggcggctacaactacgtgtcctggtaccaacagcacccgggaaaggcccccaagctcatgatctacgacgtgtccaacaggccctcgggagtgtccaaccggttctcgggttcgaaatcgggaaacacagccagcctgaccatcagcggactgcaggctgaagatgaagccgactactactgctcctcctacacctcgtcatccacgctctacgtgttcggcactggaactcagctgactgtgctgaccactaccccagcaccgaggccacccaccccggctcctaccatcgcctcccagcctctgtccctgcgtccggaggcatgtagacccgcagctggtggggccgtgcatacccggggtcttgacttcgcctgcgatatctacatttgggcccctctggctggtacttgcggggtcctgctgctttcactcgtgatcactctttactgtaagcgcggtcggaagaagctgctgtacatctttaagcaacccttcatgaggcctgtgcagactactcaagaggaggacggctgttcatgccggttcccagaggaggaggaaggcggctgcgaactgcgcgtgaaattcagccgcagcgcagatgctccagcctaccagcaggggcagaaccagctctacaacgaactcaatcttggtcggagagaggagtacgacgtgctggacaagcggagaggacgggacccagaaatgggcgggaagccgcgcagaaagaatccccaagagggcctgtacaacgagctccaaaaggataagatggcagaagcctatagcgagattggtatgaaaggggaacgcagaagaggcaaaggccacgacggactgtaccagggactcagcaccgccaccaaggacacctatgacgctcttcacatgcaggccctgccgcctcgg |
| | 726 | MALPVTALLLPLALLLHAARPEIVMTQSPATLSLSPGERATLSCRASQDISKYLNWYQQKPGQAPRLLIYHTSRLHSGIPARFSGSGSGTDYTLTISSLQPEDFAVYFCQQGNTLPYTFGQGTKLEIKGGGGSGGGGSGGGGSQVQLQESGPGLVKPSETLSLTCTVSGVSLPDYGVSWIRQPPGKGLEWIGVIWGSETTYYQSSLKSRVTISKDNSKNQVSLKLSSVTAADTAVYYCAKHYYYGGSYAMDYWGQGTLVTVSSLAEAAAKEVQLQQSGPGLVKPSQTLSLTCAISGDSMLSNSDTWNWIRQSPSRGLEWLGRTYHRSTWYDDYASSVRGRVSINVDTSKNQYSLQLNAVTPEDTGVYYCARVRLQDGNSWSDAFDVWGQGTMVTVSSGGGGSGGGGSGGGGSQSALTQPASASGSPGQSVTISCTGTSSDVGGYNYVSWYQQHPGKAPKLMIYDVSNRPSGVSNRFSGSKSGNTASLTISGLQAEDEADYYCSSYTSSSTLYVFGTGTQLTVLTTTPAPRPPTPAPTIASQPLSLRPEACRPAAGGAVHTRGLDFACDIYIWAPLAGTCGVLLLSLVITLYCKRGRKKLLYIFKQPFMRPVQTTQEEDGCSCRFPEEEEGGCELRVKFSRSADAPAYQQGQNQLYNELNLGRREEYDVLDKRRGRDPEMGGKPRRKNPQEGLYNELQKDKMAEAYSEIGMKGERRRGKGHDGLYQGLSTATKDTYDALHMQALPPR |
| CG#c182 | 727 | atggccctccctgtcaccgccctgctgcttccgctggctcttctgctccacgccgctcggcccgaagtgcagcttcaacaatcaggaccaggactcgtcaaaccatcacagaccctctccctcacatgtgccatctccggggactccatgttgagcaattccgacacttggaattggattagacaaagcccgtcccggggtctggaatggttgggacgcacctaccaccggtctacttggtacgacgactacgcgtcatccgtgcggggaagagtgtccatcaacgtggacacctccaagaaccagtacagcctgcagcttaatgccgtgactcctgaggatacgggcgtctactactgcgcccgcgtccgcctgcaagacgggaacagctggagcgatgcattcgatgtctggggccagggaactatggtcaccgtgtcgtctgggggcggtggatcgggtggcgggggttcggggggcggcggctctcagtccgctcttacccaaccggcctcagcctcggggagccccggccagagcgtgaccatttcctgcaccggcacttcatccgacgtgggcggctacaactacgtgtcctggtaccaacagcacccgggaaaggcccccaagctcatgatctacgacgtgtccaacaggccctcgggagtgtccaaccggttctcgggttcgaaatcgggaaacacagccagcctgaccatcagcggactgcaggctgaagatgaagccgactactactgctcctcctacacctcgtcatccacgctctacgtgttcggcactggaactcagctgactgtgctgggagggggagggagtgaaattgtgatgacccagtcacccgccactcttagcctttcacccggtgagcgcgcaaccctgtcttgcagagcctcccaagacatctcaaaataccttaattggtatcaacagaagcccggacaggctcctcgccttctgatctaccacaccagccggctccattctggaatccctgccaggttcagcggtagcggatctgggaccgactacaccctcactatcagctcactgcagccagaggacttcgctgtctatttctgtcagcaagggaacaccctgccctacacctttggacagggcaccaagctcgagattaaaggtggaggtggcagcggaggaggtgggtccggcggtggaggaagccaggtccaactccaagaaagcggaccgggtcttgtgaagccatcagaaactctttcactgacttgtactgtgagcggagtgtctctccccgattacggggtgtcttggatcagacagccaccggggaagggtctggaatggattggagtgatttggggctctgagactacttactaccaatcatccctcaagtcacgcgtcaccatctcaaaggacaactctaagaatcaggtgtcactgaaactgtcatctgtgaccgcagccgacaccgccgtgtactattgcgctaagcattactattatggcgggagctacgcaatggattactggggacagggtactctggtcaccgtgtccagcaccactaccccagcaccgaggccacccaccccggctcctaccatcgcctcccagcctctgtccctgcgtccggaggcatgtagacccgcagctggtggggccgtgcatacccggggtcttgacttcgcctgcgatatctacatttgggcccctctggctggtacttgcggggtcctgctgctttcactcgtgatcactctttactgtaagcgcggtcggaagaagctgctgtacatctttaagcaacccttcatgaggcctgtgcagactactcaagaggaggacggctgttcatgccggttcccagaggaggaggaaggcggctgcgaactgcgcgtgaaattcagccgcagcgcagatgctccagcctaccagcaggggcagaaccagctctacaacgaactcaatcttggtcggagagaggagtacgacgtgctggacaagcggagaggacgggacccagaaatgggcgggaagccgcgcagaaagaatccccaagagggcctgtacaacgagctccaaaaggataagatggcagaagcctatagcgagattggtatgaaaggggaacgcagaagaggcaaaggccacgacggactgtaccagggactcagcaccgccaccaaggacacctatgacgctcttcacatgcaggccctgccgcctcgg |
| | 728 | MALPVTALLLPLALLLHAARPEVQLQQSGPGLVKPSQTLSLTCAISGDSMLSNSDTWNWIRQSPSRGLEWLGRTYHRSTWYDDYASSVRGRVSINVDTSKNQYSLQLNAVTPEDTGVYYCARVRLQDGNSWSDAFDVWGQGTMVTVSSGGGGSGGGGSGGGGSQSALTQPASASGSPGQSVTISCTGTSSDVGGYNYVSWYQQHPGKAPKLMIYDVSNRPSGVSNRFSGSKSGNTASLTISGLQAEDEADYYCSSYTSSSTLYVFGTGTQLTVLGGGGSEIVMTQSPATLSLSPGERATLSCRASQDISKYLNWYQQKPGQAPRLLIYHTSRLHSGIPARFSGSGSGTDYTLTISSLQPEDFAVYFCQQGNTLPYTFGQGTKLEIKGGGGSGGGGSGGGGSQVQLQESGPGLVKPSETLSLTCTVSGVSLPDYGVSWIRQPPGKGLEWIGVIWGSETTYYQSSLKSRVTISKDNSKNQVSLKLSSVTAADTAVYYCAKHYYYGGSYAMDYWGQGTLVTVSSTTTPAPRPPTPAPTIASQPLSLRPEACRPAAGGAVHTRGLDFACDIYIWAPLAGTCGVLLLSLVITLYCKRGRKKLLYIFKQPFMRPVQTTQEEDGCSCRFPEEEEGGCELRVKFSRSADAPAYQQGQNQLYNELNLGRREEYDVLDKRRGRDPEMGGKPRRKNPQEGLYNELQKDKMAEAYSEIGMKGERRRGKGHDGLYQGLSTATKDTYDALHMQALPPR |
| CG#c188 | 729 | atggccctccctgtcaccgccctgctgcttccgctggctcttctgctccacgccgctcggccccagtccgctcttacccaaccggcctcagcctcggggagccccggccagagcgtgaccatttcctgcaccggcacttcatccgacgtgggcggctacaactacgtgtcctggtaccaacagcacccgggaaaggcccccaagctcatgatctacgacgtgtccaacaggccctcgggagtgtccaaccggttctcgggttcgaaatcgggaaacacagccagcctgaccatcagcggactgcaggctgaagatgaagccgactactactgctcctcctacacctcgtcatccacgctctacgtgttcggcactggaactcagctgactgtgctgggcggaggaggctccgaagtgcagcttcaacaatcaggaccaggactcgtcaaaccatcacagaccctctccctcacatgtgccatctccggggactccatgttgagcaattccgacacttggaattggattagacaaagcccgtcccggggtctggaatggttgggacgcacctaccaccggtctacttggtacgacgactacgcgtcatccgtgcggggaagagtgtccatcaacgtggacacctccaagaaccagtacagcctgcagcttaatgccgtgactcctgaggatacgggcgtctactactgcgcccgcgtccgcctgcaagacgggaacagctggagcgatgcattcgatgtctggggccagggaactatggtcaccgtgtcgtctggagggggagggagtgaaattgtgatgacccagtcacccgccactcttagcctttcacccggtgagcgcgcaaccctgtcttgcagagcctcccaagacatctcaaaataccttaattggtatcaacagaagcccggacaggctcctcgccttctgatctaccacaccagccggctccattctggaatccctgccaggttcagcggtagcggatctgggaccgactacaccctcactatcagctcactgcagccagaggacttcgctgtctatttctgtcagcaagggaacaccctgccctacacctttggacagggcaccaagctcgagattaaaggtggaggtggcagcggaggaggtgggtccggcggtggaggaagccaggtccaactccaagaaagcggaccgggtcttgtgaagccatcagaaactctttcactgacttgtactgtgagcggagtgtctctccccgattacggggtgtcttggatcagacagccaccggggaagggtctggaatggattggagtgatttggggctctgagactacttactaccaatcatccctcaagtcacgcgtcaccatctcaaaggacaactctaagaatcaggtgtcactgaaactgtcatctgtgaccgcagccgacaccgccgtgtactattgcgctaagcattactattatggcgggagctacgcaatggattactggggacagggtactctggtcaccgtgtccagcaccactaccccagcaccgaggccacccaccccggctcctaccatcgcctcccagcctctgtccctgcgtccggaggcatgtagacccgcagctggtggggccgtgcatacccggggtcttgacttcgcctgcgatatctacatttgggcccctctggctggtacttgcggggtcctgctgctttcactcgtgatcactctttactgtaagcgcggtcggaagaagctgctgtacatctttaagcaacccttcatgaggcctgtgcagactactcaagaggaggacggctgttcatgccggttcccagaggaggaggaaggcggctgcgaactgcgcgtgaaattcagccgcagcgcagatgctccagcctaccagcaggggcagaaccagctctacaacgaactcaatcttggtcggagagaggagtacgacgtgctggacaagcggagaggacgggacccagaaatgggcgggaagccgcgcagaaagaatccccaagagggcctgtacaacgagctccaaaaggataagatggcagaagcctatagcgagattggtatgaaaggggaacgcagaagaggcaaaggccacgacggactgtaccagggactcagcaccgccaccaaggacacctatgacgctcttcacatgcaggccctgccgcctcgg |
| | 730 | MALPVTALLLPLALLLHAARPQSALTQPASASGSPGQSVTISCTGTSSDVGGYNYVSWYQQHPGKAPKLMIYDVSNRPSGVSNRFSGSKSGNTASLTISGLQAEDEADYYCSSYTSSSTLYVFGTGTQLTVLGGGGSEVQLQQSGPGLVKPSQTLSLTCAISGDSMLSNSDTWNWIRQSPSRGLEWLGRTYHRSTWYDDYASSVRGRVSINVDTSKNQYSLQLNAVTPEDTGVYYCARVRLQDGNSWSDAFDVWGQGTMVTVSSGGGGSEIVMTQSPATLSLSPGERATLSCRASQDISKYLNWYQQKPGQAPRLLIYHTSRLHSGIPARFSGSGSGTDYTLTISSLQPEDFAVYFCQQGNTLPYTFGQGTKLEIKGGGGSGGGGSGGGGSQVQLQESGPGLVKPSETLSLTCTVSGVSLPDYGVSWIRQPPGKGLEWIGVIWGSETTYYQSSLKSRVTISKDNSKNQVSLKLSSVTAADTAVYYCAKHYYYGGSYAMDYWGQGTLVTVSSTTTPAPRPPTPAPTIASQPLSLRPEACRPAAGGAVHTRGLDFACDIYIWAPLAGTCGVLLLSLVITLYCKRGRKKLLYIFKQPFMRPVQTTQEEDGCSCRFPEEEEGGCELRVKFSRSADAPAYQQGQNQLYNELNLGRREEYDVLDKRRGRDPEMGGKPRRKNPQEGLYNELQKDKMAEAYSEIGMKGERRRGKGHDGLYQGLSTATKDTYDALHMQALPPR |
| CG#c224 | 731 | atggccctgcccgtgactgcgctcctgcttccgttggccctgctcctgcatgccgccagacctcagtccgctctgactcagccggcctcagcttcggggtcccctggtcaaagcgtcactatttcctgtaccggaacctcatcagacgtgggcggctacaattacgtgtcctggtaccaacagcaccccggaaaggctcctaagcttatgatctacgacgtgtccaaccggccgtcaggagtgtccaacagattctccggctccaagagcggaaacactgccagcttgaccattagcggcttgcaggccgaggacgaagccgactactactgctctagctacacatcctcgtctaccctctacgtgtttggaacggggacccagctgactgtgctcgggggtggaggatcagaggtgcaactccagcagtccggtcctggcctcgtgaaaccgtcccaaaccctgtccctgacttgcgccatctcgggcgactccatgctgtccaattccgacacctggaactggattagacaatcgcctagccggggactcgaatggctgggccggacctaccaccggtccacgtggtatgacgactacgcaagctccgtccggggaagggtgtccattaacgtcgatacctccaagaaccagtacagccttcagctgaacgctgtgacccccgaggataccggcgtctactactgtgcaagagtgcgattgcaggatggaaactcgtggtcggacgcattcgatgtctggggacagggaactatggtgaccgtgtcctcgggcggaggcgggagcggaggaggaggctctggcggaggaggaagcgagattgtcatgactcagtccccggccacactctccctgtcacccggagaaagagcaaccctgagctgcagggcgtcccaggacatctcgaagtacctgaactggtaccagcagaagcctggacaagcaccccgcctcctgatctaccacacctcgcggctgcattcgggaatccccgccagattctcagggagcggatcaggaaccgactacaccctgactatctcgagcctgcaaccagaggatttcgccgtgtacttctgccagcaaggaaacaccctgccctacacctttggacagggaaccaagctcgagattaaggggggtggtggatcgggagggggtggatcaggaggaggcggctcacaagtccagctgcaagaatccggtccgggacttgtgaagccgtccgaaaccctgtcactgacttgcactgtgtccggggtgtcattgcccgactacggcgtgagctggattcggcagccccctggaaagggattggaatggatcggcgtgatctggggttcggaaactacctactatcagtcctcactgaagtcccgcgtgaccatcagcaaggataattccaaaaaccaagtgtctctgaagctctccagcgtcactgccgccgatactgccgtgtactactgcgccaagcactactattacggcggttcgtacgccatggactactggggccaagggacactcgtgaccgtgtcatccaccactaccccagcaccgaggccacccaccccggctcctaccatcgcctcccagcctctgtccctgcgtccggaggcatgtagacccgcagctggtggggccgtgcatacccggggtcttgacttcgcctgcgatatctacatttgggcccctctggctggtacttgcggggtcctgctgctttcactcgtgatcactctttactgtaagcgcggtcggaagaagctgctgtacatctttaagcaacccttcatgaggcctgtgcagactactcaagaggaggacggctgttcatgccggttcccagaggaggaggaaggcggctgcgaactgcgcgtgaaattcagccgcagcgcagatgctccagcctaccagcaggggcagaaccagctctacaacgaactcaatcttggtcggagagaggagtacgacgtgctggacaagcggagaggacgggacccagaaatgggcgggaagccgcgcagaaagaatccccaagagggcctgtacaacgagctccaaaaggataagatggcagaagcctatagcgagattggtatgaaaggggaacgcagaagaggcaaaggccacgacggactgtaccagggactcagcaccgccaccaaggacacctatgacgctcttcacatgcaggccctgccgcctcgg |
| | 732 | MALPVTALLLPLALLLHAARPQSALTQPASASGSPGQSVTISCTGTSSDVGGYNYVSWYQQHPGKAPKLMIYDVSNRPSGVSNRFSGSKSGNTASLTISGLQAEDEADYYCSSYTSSSTLYVFGTGTQLTVLGGGGSEVQLQQSGPGLVKPSQTLSLTCAISGDSMLSNSDTWNWIRQSPSRGLEWLGRTYHRSTWYDDYASSVRGRVSINVDTSKNQYSLQLNAVTPEDTGVYYCARVRLQDGNSWSDAFDVWGQGTMVTVSSGGGGSGGGGSGGGGSEIVMTQSPATLSLSPGERATLSCRASQDISKYLNWYQQKPGQAPRLLIYHTSRLHSGIPARFSGSGSGTDYTLTISSLQPEDFAVYFCQQGNTLPYTFGQGTKLEIKGGGGSGGGGSGGGGSQVQLQESGPGLVKPSETLSLTCTVSGVSLPDYGVSWIRQPPGKGLEWIGVIWGSETTYYQSSLKSRVTISKDNSKNQVSLKLSSVTAADTAVYYCAKHYYYGGSYAMDYWGQGTLVTVSSTTTPAPRPPTPAPTIASQPLSLRPEACRPAAGGAVHTRGLDFACDIYIWAPLAGTCGVLLLSLVITLYCKRGRKKLLYIFKQPFMRPVQTTQEEDGCSCRFPEEEEGGCELRVKFSRSADAPAYQQGQNQLYNELNLGRREEYDVLDKRRGRDPEMGGKPRRKNPQEGLYNELQKDKMAEAYSEIGMKGERRRGKGHDGLYQGLSTATKDTYDALHMQALPPR |
| CG#c227 | 733 | atggccctgcccgtgactgcgctcctgcttccgttggccctgctcctgcatgccgccagacctcagtccgctctgactcagccggcctcagcttcggggtcccctggtcaaagcgtcactatttcctgtaccggaacctcatcagacgtgggcggctacaattacgtgtcctggtaccaacagcaccccggaaaggctcctaagcttatgatctacgacgtgtccaaccggccgtcaggagtgtccaacagattctccggctccaagagcggaaacactgccagcttgaccattagcggcttgcaggccgaggacgaagccgactactactgctctagctacacatcctcgtctaccctctacgtgtttggaacggggacccagctgactgtgctcgggggtggaggatcagaggtgcaactccagcagtccggtcctggcctcgtgaaaccgtcccaaaccctgtccctgacttgcgccatctcgggcgactccatgctgtccaattccgacacctggaactggattagacaatcgcctagccggggactcgaatggctgggccggacctaccaccggtccacgtggtatgacgactacgcaagctccgtccggggaagggtgtccattaacgtcgatacctccaagaaccagtacagccttcagctgaacgctgtgacccccgaggataccggcgtctactactgtgcaagagtgcgattgcaggatggaaactcgtggtcggacgcattcgatgtctggggacagggaactatggtcactgtgtcctccggcggtggaggctcgggggggggcggctcaggaggaggcggctcacaagtccagctgcaagaatccggtccgggacttgtgaagccgtccgaaaccctgtcactgacttgcactgtgtccggggtgtcattgcccgactacggcgtgagctggattcggcagccccctggaaagggattggaatggatcggcgtgatctggggttcggaaactacctactatcagtcctcactgaagtcccgcgtgaccatcagcaaggataattccaaaaaccaagtgtctctgaagctctccagcgtcactgccgccgatactgccgtgtactactgcgccaagcactactattacggcggttcgtacgccatggactactggggacaaggcactcttgtgactgtgtcaagcggcggtggagggagcggtgggggcggttcaggaggaggcggatcagagatcgtgatgacccaatccccagccaccctgtccctcagccctggagaaagagccaccctgagctgccgggcctcccaggatatcagcaagtacttgaactggtaccaacaaaagccggggcaggcgccccggctcctgatctaccacacctcgcgcctccactcaggtatccccgccagattctcagggagcggctccggtactgactacaccctgactatttcctcactgcagccagaggactttgccgtgtacttctgccagcagggaaacactctgccgtacaccttcgggcagggaacgaagcttgaaattaagaccactaccccagcaccgaggccacccaccccggctcctaccatcgcctcccagcctctgtccctgcgtccggaggcatgtagacccgcagctggtggggccgtgcatacccggggtcttgacttcgcctgcgatatctacatttgggcccctctggctggtacttgcggggtcctgctgctttcactcgtgatcactctttactgtaagcgcggtcggaagaagctgctgtacatctttaagcaacccttcatgaggcctgtgcagactactcaagaggaggacggctgttcatgccggttcccagaggaggaggaaggcggctgcgaactgcgcgtgaaattcagccgcagcgcagatgctccagcctaccagcaggggcagaaccagctctacaacgaactcaatcttggtcggagagaggagtacgacgtgctggacaagcggagaggacgggacccagaaatgggcgggaagccgcgcagaaagaatccccaagagggcctgtacaacgagctccaaaaggataagatggcagaagcctatagcgagattggtatgaaaggggaacgcagaagaggcaaaggccacgacggactgtaccagggactcagcaccgccaccaaggacacctatgacgctcttcacatgcaggccctgccgcctcgg |
| | 734 | MALPVTALLLPLALLLHAARPQSALTQPASASGSPGQSVTISCTGTSSDVGGYNYVSWYQQHPGKAPKLMIYDVSNRPSGVSNRFSGSKSGNTASLTISGLQAEDEADYYCSSYTSSSTLYVFGTGTQLTVLGGGGSEVQLQQSGPGLVKPSQTLSLTCAISGDSMLSNSDTWNWIRQSPSRGLEWLGRTYHRSTWYDDYASSVRGRVSINVDTSKNQYSLQLNAVTPEDTGVYYCARVRLQDGNSWSDAFDVWGQGTMVTVSSGGGGSGGGGSGGGGSQVQLQESGPGLVKPSETLSLTCTVSGVSLPDYGVSWIRQPPGKGLEWIGVIWGSETTYYQSSLKSRVTISKDNSKNQVSLKLSSVTAADTAVYYCAKHYYYGGSYAMDYWGQGTLVTVSSGGGGSGGGGSGGGGSEIVMTQSPATLSLSPGERATLSCRASQDISKYLNWYQQKPGQAPRLLIYHTSRLHSGIPARFSGSGSGTDYTLTISSLQPEDFAVYFCQQGNTLPYTFGQGTKLEIKTTTPAPRPPTPAPTIASQPLSLRPEACRPAAGGAVHTRGLDFACDIYIWAPLAGTCGVLLLSLVITLYCKRGRKKLLYIFKQPFMRPVQTTQEEDGCSCRFPEEEEGGCELRVKFSRSADAPAYQQGQNQLYNELNLGRREEYDVLDKRRGRDPEMGGKPRRKNPQEGLYNELQKDKMAEAYSEIGMKGERRRGKGHDGLYQGLSTATKDTYDALHMQALPPR |
| Dual CD19-CD22 CARs | | |
| CG#c201 | | |
| Full length CD19-CD22 Dual CAR nucleic acid | 735 | atggccctccctgtcaccgccctgctgcttccgctggctcttctgctccacgccgctcggcccgaagtgcagctgcagcagtcagggcctggcctggtcaagccgtcgcagaccctctccctgacatgcgccattagcggggactccatgctgagcaactcggacacctggaactggattcggcagtccccttcccggggactcgagtggctcggacgcacctaccatcggagcacttggtacgacgactacgcctcctccgtgagaggtcgcgtgtcgatcaacgtggatacctcgaagaaccagtatagcttgcaactgaacgccgtgacccctgaggataccggagtgtactattgtgcgagagtcaggctgcaagacggaaactcctggtccgacgcatttgatgtctggggacagggtactatggtcacggtgtcatctggaggcggaggatcgcaaagcgccctgactcagccggcttcggctagcggttcaccggggcagtccgtgactatctcctgcaccgggacttcctccgacgtgggaggctacaattacgtgtcctggtaccagcaacaccccggcaaagccccaaagctgatgatctacgacgtcagcaacagacccagcggagtgtccaaccggttcagcggctccaagtccggcaacaccgcctccctgaccatcagcgggcttcaggccgaagatgaggcggattactactgctcctcgtacacctcaagctcaactctgtacgtgttcggcaccggtactcagctcaccgtgctgaccactaccccagcaccgaggccacccaccccggctcctaccatcgcctcccagcctctgtccctgcgtccggaggcatgtagacccgcagctggtggggccgtgcatacccggggtcttgacttcgcctgcgatatctacatttgggcccctctggctggtacttgcggggtcctgctgctttcactcgtgatcactctttactgtaagcgcggtcggaagaagctgctgtacatctttaagcaacccttcatgaggcctgtgcagactactcaagaggaggacggctgttcatgccggttcccagaggaggaggaaggcggctgcgaactgcgcgtgaaattcagccgcagcgcagatgctccagcctaccagcaggggcagaaccagctctacaacgaactcaatcttggtcggagagaggagtacgacgtgctggacaagcggagaggacgggacccagaaatgggcgggaagccgcgcagaaagaatccccaagagggcctgtacaacgagctccaaaaggataagatggcagaagcctatagcgagattggtatgaaaggggaacgcagaagaggcaaaggccacgacggactgtaccagggactcagcaccgccaccaaggacacctatgacgctcttcacatgcaggccctgccgcctcggggaagcggagctactaacttcagcctgctgaagcaggctggagacgtggaggagaaccctggacctatggccttaccagtgaccgccttgctcctgccgctggccttgctgctccacgccgccaggccggaaattgtgatgacccagtcacccgccactcttagcctttcacccggtgagcgcgcaaccctgtcttgcagagcctcccaagacatctcaaaataccttaattggtatcaacagaagcccggacaggctcctcgccttctgatctaccacaccagccggctccattctggaatccctgccaggttcagcggtagcggatctgggaccgactacaccctcactatcagctcactgcagccagaggacttcgctgtctatttctgtcagcaagggaacaccctgccctacacctttggacagggcaccaagctcgagattaaaggtggaggtggcagcggaggaggtgggtccggcggtggaggaagccaggtccaactccaagaaagcggaccgggtcttgtgaagccatcagaaactctttcactgacttgtactgtgagcggagtgtctctccccgattacggggtgtcttggatcagacagccaccggggaagggtctggaatggattggagtgatttggggctctgagactacttactaccaatcatccctcaagtcacgcgtcaccatctcaaaggacaactctaagaatcaggtgtcactgaaactgtcatctgtgaccgcagccgacaccgccgtgtactattgcgctaagcattactattatggcgggagctacgcaatggattactggggacagggtactctggtcaccgtgtccagcaccacgacgccagcgccgcgaccaccaacaccggcgcccaccatcgcgtcgcagcccctgtccctgcgcccagaggcgtgccggccagcggcggggggcgcagtgcacacgagggggctggacttcgcctgtgatatctacatctgggcgcccttggccgggacttgtggggtccttctcctgtcactggttatcaccctttactgcaaacggggcagaaagaaactcctgtatatattcaaacaaccatttatgagaccagtacaaactactcaagaggaagatggctgtagctgccgatttccagaagaagaagaaggaggatgtgaactgagagtgaagttcagcaggagcgcagacgcccccgcgtaccagcagggccagaaccagctctataacgagctcaatctaggacgaagagaggagtacgatgttttggacaagagacgtggccgggaccctgagatggggggaaagccgagaaggaagaaccctcaggaaggcctgtacaatgaactgcagaaagataagatggcggaggcctacagtgagattgggatgaaaggcgagcgccggaggggcaaggggcacgatggcctttaccagggtctcagtacagccaccaaggacacctacgacgcccttcacatgcaggccctgccccctcgc |
| Full length CD19-CD22 Dual CAR amino acid | 736 | MALPVTALLLPLALLLHAARPEVQLQQSGPGLVKPSQTLSLTCAISGDSMLSNSDTWNWIRQSPSRGLEWLGRTYHRSTWYDDYASSVRGRVSINVDTSKNQYSLQLNAVTPEDTGVYYCARVRLQDGNSWSDAFDVWGQGTMVTVSSGGGGSQSALTQPASASGSPGQSVTISCTGTSSDVGGYNYVSWYQQHPGKAPKLMIYDVSNRPSGVSNRFSGSKSGNTASLTISGLQAEDEADYYCSSYTSSSTLYVFGTGTQLTVLTTTPAPRPPTPAPTIASQPLSLRPEACRPAAGGAVHTRGLDFACDIYIWAPLAGTCGVLLLSLVITLYCKRGRKKLLYIFKQPFMRPVQTTQEEDGCSCRFPEEEEGGCELRVKFSRSADAPAYQQGQNQLYNELNLGRREEYDVLDKRRGRDPEMGGKPRRKNPQEGLYNELQKDKMAEAYSEIGMKGERRRGKGHDGLYQGLSTATKDTYDALHMQALPPRGSGATNFSLLKQAGDVEENPGPMALPVTALLLPLALLLHAARPEIVMTQSPATLSLSPGERATLSCRASQDISKYLNWYQQKPGQAPRLLIYHTSRLHSGIPARFSGSGSGTDYTLTISSLQPEDFAVYFCQQGNTLPYTFGQGTKLEIKGGGGSGGGGSGGGGSQVQLQESGPGLVKPSETLSLTCTVSGVSLPDYGVSWIRQPPGKGLEWIGVIWGSETTYYQSSLKSRVTISKDNSKNQVSLKLSSVTAADTAVYYCAKHYYYGGSYAMDYWGQGTLVTVSSTTTPAPRPPTPAPTIASQPLSLRPEACRPAAGGAVHTRGLDFACDIYIWAPLAGTCGVLLLSLVITLYCKRGRKKLLYIFKQPFMRPVQTTQEEDGCSCRFPEEEEGGCELRVKFSRSADAPAYQQGQNQLYNELNLGRREEYDVLDKRRGRDPEMGGKPRRKNPQEGLYNELQKDKMAEAYSEIGMKGERRRGKGHDGLYQGLSTATKDTYDALHMQALPPR |
| CD22 CAR (with P2A site) | 737 | MALPVTALLLPLALLLHAARPEVQLQQSGPGLVKPSQTLSLTCAISGDSMLSNSDTWNWIRQSPSRGLEWLGRTYHRSTWYDDYASSVRGRVSINVDTSKNQYSLQLNAVTPEDTGVYYCARVRLQDGNSWSDAFDVWGQGTMVTVSSGGGGSQSALTQPASASGSPGQSVTISCTGTSSDVGGYNYVSWYQQHPGKAPKLMIYDVSNRPSGVSNRFSGSKSGNTASLTISGLQAEDEADYYCSSYTSSSTLYVFGTGTQLTVLTTTPAPRPPTPAPTIASQPLSLRPEACRPAAGGAVHTRGLDFACDIYIWAPLAGTCGVLLLSLVITLYCKRGRKKLLYIFKQPFMRPVQTTQEEDGCSCRFPEEEEGGCELRVKFSRSADAPAYQQGQNQLYNELNLGRREEYDVLDKRRGRDPEMGGKPRRKNPQEGLYNELQKDKMAEAYSEIGMKGERRRGKGHDGLYQGLSTATKDTYDALHMQALPPRGSGATNFSLLKQAGDVEENPG |
| CD19 CAR | 738 | PMALPVTALLLPLALLLHAARPEIVMTQSPATLSLSPGERATLSCRASQDISKYLNWYQQKPGQAPRLLIYHTSRLHSGIPARFSGSGSGTDYTLTISSLQPEDFAVYFCQQGNTLPYTFGQGTKLEIKGGGGSGGGGSGGGGSQVQLQESGPGLVKPSETLSLTCTVSGVSLPDYGVSWIRQPPGKGLEWIGVIWGSETTYYQSSLKSRVTISKDNSKNQVSLKLSSVTAADTAVYYCAKHYYYGGSYAMDYWGQGTLVTVSSTTTPAPRPPTPAPTIASQPLSLRPEACRPAAGGAVHTRGLDFACDIYIWAPLAGTCGVLLLSLVITLYCKRGRKKLLYIFKQPFMRPVQTTQEEDGCSCRFPEEEEGGCELRVKFSRSADAPAYQQGQNQLYNELNLGRREEYDVLDKRRGRDPEMGGKPRRKNPQEGLYNELQKDKMAEAYSEIGMKGERRRGKGHDGLYQGLSTATKDTYDALHMQALPPR |
| CG#c203 | | |
| Full length CD19-CD22 Dual CAR nucleic acid | 739 | atggccttaccagtgaccgccttgctcctgccgctggccttgctgctccacgccgccaggccggaaattgtgatgacccagtcacccgccactcttagcctttcacccggtgagcgcgcaaccctgtcttgcagagcctcccaagacatctcaaaataccttaattggtatcaacagaagcccggacaggctcctcgccttctgatctaccacaccagccggctccattctggaatccctgccaggttcagcggtagcggatctgggaccgactacaccctcactatcagctcactgcagccagaggacttcgctgtctatttctgtcagcaagggaacaccctgccctacacctttggacagggcaccaagctcgagattaaaggtggaggtggcagcggaggaggtgggtccggcggtggaggaagccaggtccaactccaagaaagcggaccgggtcttgtgaagccatcagaaactctttcactgacttgtactgtgagcggagtgtctctccccgattacggggtgtcttggatcagacagccaccggggaagggtctggaatggattggagtgatttggggctctgagactacttactaccaatcatccctcaagtcacgcgtcaccatctcaaaggacaactctaagaatcaggtgtcactgaaactgtcatctgtgaccgcagccgacaccgccgtgtactattgcgctaagcattactattatggcgggagctacgcaatggattactggggacagggtactctggtcaccgtgtccagcaccacgacgccagcgccgcgaccaccaacaccggcgcccaccatcgcgtcgcagcccctgtccctgcgcccagaggcgtgccggccagcggcggggggcgcagtgcacacgagggggctggacttcgcctgtgatatctacatctgggcgcccttggccgggacttgtggggtccttctcctgtcactggttatcaccctttactgcaaacggggcagaaagaaactcctgtatatattcaaacaaccatttatgagaccagtacaaactactcaagaggaagatggctgtagctgccgatttccagaagaagaagaaggaggatgtgaactgagagtgaagttcagcaggagcgcagacgcccccgcgtaccagcagggccagaaccagctctataacgagctcaatctaggacgaagagaggagtacgatgttttggacaagagacgtggccgggaccctgagatggggggaaagccgagaaggaagaaccctcaggaaggcctgtacaatgaactgcagaaagataagatggcggaggcctacagtgagattgggatgaaaggcgagcgccggaggggcaaggggcacgatggcctttaccagggtctcagtacagccaccaaggacacctacgacgcccttcacatgcaggccctgccccctcgcggaagcggagctactaacttcagcctgctgaagcaggctggagacgtggaggagaaccctggacctatggccctccctgtcaccgccctgctgcttccgctggctcttctgctccacgccgctcggcccgaagtgcagctgcagcagtcagggcctggcctggtcaagccgtcgcagaccctctccctgacatgcgccattagcggggactccatgctgagcaactcggacacctggaactggattcggcagtccccttcccggggactcgagtggctcggacgcacctaccatcggagcacttggtacgacgactacgcctcctccgtgagaggtcgcgtgtcgatcaacgtggatacctcgaagaaccagtatagcttgcaactgaacgccgtgacccctgaggataccggagtgtactattgtgcgagagtcaggctgcaagacggaaactcctggtccgacgcatttgatgtctggggacagggtactatggtcacggtgtcatctggaggcggaggatcgcaaagcgccctgactcagccggcttcggctagcggttcaccggggcagtccgtgactatctcctgcaccgggacttcctccgacgtgggaggctacaattacgtgtcctggtaccagcaacaccccggcaaagccccaaagctgatgatctacgacgtcagcaacagacccagcggagtgtccaaccggttcagcggctccaagtccggcaacaccgcctccctgaccatcagcgggcttcaggccgaagatgaggcggattactactgctcctcgtacacctcaagctcaactctgtacgtgttcggcaccggtactcagctcaccgtgctgaccactaccccagcaccgaggccacccaccccggctcctaccatcgcctcccagcctctgtccctgcgtccggaggcatgtagacccgcagctggtggggccgtgcatacccggggtcttgacttcgcctgcgatatctacatttgggcccctctggctggtacttgcggggtcctgctgctttcactcgtgatcactctttactgtaagcgcggtcggaagaagctgctgt acatctttaagcaacccttcatgaggcctgtgcagactactcaagaggaggacggctgttcatgccggttcccagaggaggaggaaggcggctgcgaactgcgcgtgaaattcagccgcagcgcagatgctccagcctaccagcaggggcagaaccagctctacaacgaactcaatcttggtcggagagaggagtacgacgtgctggacaagcggagaggacgggacccagaaatgggcgggaagccgcgcagaaagaatccccaagagggcctgtacaacgagctccaaaaggataagatggcagaagcctatagcgagattggtatgaaaggggaacgcagaagaggcaaaggccacgacggactgtaccagggactcagcaccgccaccaaggacacctatgacgctcttcacatgcaggccctgccgcctcgg |
| Full length CD19-CD22 Dual CAR amino acid | 740 | MALPVTALLLPLALLLHAARPEIVMTQSPATLSLSPGERATLSCRASQDISKYLNWYQQKPGQAPRLLIYHTSRLHSGIPARFSGSGSGTDYTLTISSLQPEDFAVYFCQQGNTLPYTFGQGTKLEIKGGGGSGGGGSGGGGSQVQLQESGPGLVKPSETLSLTCTVSGVSLPDYGVSWIRQPPGKGLEWIGVIWGSETTYYQSSLKSRVTISKDNSKNQVSLKLSSVTAADTAVYYCAKHYYYGGSYAMDYWGQGTLVTVSSTTTPAPRPPTPAPTIASQPLSLRPEACRPAAGGAVHTRGLDFACDIYIWAPLAGTCGVLLLSLVITLYCKRGRKKLLYIFKQPFMRPVQTTQEEDGCSCRFPEEEEGGCELRVKFSRSADAPAYQQGQNQLYNELNLGRREEYDVLDKRRGRDPEMGGKPRRKNPQEGLYNELQKDKMAEAYSEIGMKGERRRGKGHDGLYQGLSTATKDTYDALHMQALPPRGSGATNFSLLKQAGDVEENPGPMALPVTALLLPLALLLHAARPEVQLQQSGPGLVKPSQTLSLTCAISGDSMLSNSDTWNWIRQSPSRGLEWLGRTYHRSTWYDDYASSVRGRVSINVDTSKNQYSLQLNAVTPEDTGVYYCARVRLQDGNSWSDAFDVWGQGTMVTVSSGGGGSQSALTQPASASGSPGQSVTISCTGTSSDVGGYNYVSWYQQHPGKAPKLMIYDVSNRPSGVSNRFSGSKSGNTASLTISGLQAEDEADYYCSSYTSSSTLYVFGTGTQLTVLTTTPAPRPPTPAPTIASQPLSLRPEACRPAAGGAVHTRGLDFACDIYIWAPLAGTCGVLLLSLVITLYCKRGRKKLLYIFKQPFMRPVQTTQEEDGCSCRFPEEEEGGCELRVKFSRSADAPAYQQGQNQLYNELNLGRREEYDVLDKRRGRDPEMGGKPRRKNPQEGLYNELQKDKMAEAYSEIGMKGERRRGKGHDGLYQGLSTATKDTYDALHMQALPPR |
| CD19 CAR (with P2A site) | 741 | MALPVTALLLPLALLLHAARPEIVMTQSPATLSLSPGERATLSCRASQDISKYLNWYQQKPGQAPRLLIYHTSRLHSGIPARFSGSGSGTDYTLTISSLQPEDFAVYFCQQGNTLPYTFGQGTKLEIKGGGGSGGGGSGGGGSQVQLQESGPGLVKPSETLSLTCTVSGVSLPDYGVSWIRQPPGKGLEWIGVIWGSETTYYQSSLKSRVTISKDNSKNQVSLKLSSVTAADTAVYYCAKHYYYGGSYAMDYWGQGTLVTVSSTTTPAPRPPTPAPTIASQPLSLRPEACRPAAGGAVHTRGLDFACDIYIWAPLAGTCGVLLLSLVITLYCKRGRKKLLYIFKQPFMRPVQTTQEEDGCSCRFPEEEEGGCELRVKFSRSADAPAYQQGQNQLYNELNLGRREEYDVLDKRRGRDPEMGGKPRRKNPQEGLYNELQKDKMAEAYSEIGMKGERRRGKGHDGLYQGLSTATKDTYDALHMQAL PPRGSGATNFSLLKQAGDVEENPG |
| CD22 CAR | 742 | PMALPVTALLLPLALLLHAARPEVQLQQSGPGLVKPSQTLSLTCAISGDSMLSNSDTWNWIRQSPSRGLEWLGRTYHRSTWYDDYASSVRGRVSINVDTSKNQYSLQLNAVTPEDTGVYYCARVRLQDGNSWSDAFDVWGQGTMVTVSSGGGGSQSALTQPASASGSPGQSVTISCTGTSSDVGGYNYVSWYQQHPGKAPKLMIYDVSNRPSGVSNRFSGSKSGNTASLTISGLQAEDEADYYCSSYTSSSTLYVFGTGTQLTVLTTTPAPRPPTPAPTIASQPLSLRPEACRPAAGGAVHTRGLDFACDIYIWAPLAGTCGVLLLSLVITLYCKRGRKKLLYIFKQPFMRPVQTTQEEDGCSCRFPEEEEGGCELRVKFSRSADAPAYQQGQNQLYNELNLGRREEYDVLDKRRGRDPEMGGKPRRKNPQEGLYNELQKDKMAEAYSEIGMKGERRRGKGHDGLYQGLSTATKDTYDALH MQALPPR |
| CG#c230 | | |
| Full length CD19-CD22 Dual CAR nucleic acid | 743 | atggcacttcccgtcaccgccctgctgctcccactcgccctccttctgcacgccgcccgccccgaagtgcagctgcagcagtcaggaccgggcctggtcaaaccttcgcagactctgtccctgacttgcgctataagcggggactccatgctgagcaattcggacacttggaactggattcgccaaagccccagccggggtctggaatggctgggaaggacctaccatcgctctacttggtacgacgactacgccagctccgtgcgaggacgcgtgtccatcaacgtggacacctccaagaaccagtactcgcttcaactcaacgcagtgacccctgaagataccggagtctactattgcgcccgcgtgcggctccaggacgggaactcctggtcggacgctttcgatgtctggggacagggcactatggtcaccgtcagctccggcggcggcggtagccaatcggcgctgacacagccggcttccgcctcgggatcgcctggacagtcggtgaccatctcgtgcactggaacctcctccgacgtgggcggctacaattatgtgtcatggtaccagcagcacccgggaaaggcccctaagctgatgatctacgacgtgtccaatagacctagcggggtgtcaaacagattctccggatccaaatccggaaacactgcctccctgaccatttccggactgcaggccgaggacgaagccgattactactgctcctcttacacctcctcatccaccctctacgtgtttgggactgggacccagctgaccgtcctcactaccaccccggccccgcggccccctacaccggcaccgactattgccagccagcctctctcgctgcggccggaggcctgccgcccagccgccggcggagccgtgcacacccgcggtctggacttcgcgtgcgatatctacatctgggctccgctggccgggacttgtggcgtgctgctgctgtctctggtcatcacactgtactgcaagcgcggaagaaagaagctgctctacatcttcaagcaacccttcatgcggcctgtgcagaccacccaggaagaggatggctgctcctgccggttcccggaggaagaagagggcggatgcgaactgcgcgtgaagttcagccgaagcgccgacgccccggcctaccagcagggccagaaccaactgtacaacgaactcaacctgggtcggagagaagagtacgacgtgctggacaaaagacgcggcagggaccccgagatgggcggaaagcctcgccgcaagaacccgcaggagggcctctacaacgagctgcagaaggacaagatggccgaagcctactcagagatcggcatgaagggggagcggaggcgcgggaagggccacgacggtttgtaccaaggactttccactgcgaccaaggacacctacgatgccctccatatgcaagccctgccgccccggggttccggagctaccaacttctcgctgttgaagcaggccggagatgtcgaggaaaacccgggacctatggccctgccagtgaccgcgctcctgctgcccctggctctgctgcttcacgcggcccggcctgagattgtgatgactcagagcccggcgaccctgtccctgtcccccggggagagagcaaccctgtcgtgccgggcctcccaagacatctcaaagtacctcaattggtatcagcagaagccaggacaggctccacggttgctgatctaccacacttcgagactgcactcaggaatccccgcgcggttttccggttccggctccgggaccgactacaccctgaccatcagctcgctccagcctgaggatttcgcagtgtacttctgtcagcaaggaaacacccttccatacaccttcggacagggtaccaagctggaaatcaagggaggaggaggatctgggggcggtggttccggaggcggtggaagccaagtgcagctccaggaaagcggacccgggctggtcaagccgagcgaaaccctctcactgacttgtactgtgtccggagtgtccctgcctgactatggagtgtcctggatccgacagccccccggaaagggtctggagtggattggggtcatctggggctccgaaactacctactaccagagcagcctcaagagccgggtcaccatttcaaaggataactccaagaatcaagtgtccctgaagctgtcctcagtgacagccgcagacaccgccgtgtactactgcgccaagcactactactacggaggctcctacgcaatggactactggggacaaggcactttggtcactgtgtcaagcaccaccacccctgcgcctcggcctcctaccccggctcccactatcgcgagccagccgctgagcctgcggcctgaggcttgccgaccggccgctggcggcgccgtgcatactcggggcctcgactttgcctgtgacatctacatctgggcccccctggccggaacgtgcggagtgctgctgctgtcgctggtcattaccctgtattgcaaacgcggaaggaagaagctgttgtacattttcaagcagcccttcatgcgcccggtgcaaactactcaggaggaagatggctgttcctgtcggttccccgaagaggaagaaggcggctgcgagttgagggtcaagttctcccggtccgccgatgctcccgcctaccaacaggggcagaaccagctttataacgaactgaacctgggcaggagggaggaatatgatgtgttggataagcgccggggccgggacccagaaatggggggaaagcccagaagaaagaaccctcaagagggactttacaacgaattgcagaaagacaaaatggccgaggcctactccgagattgggatgaagggcgaaagacggagaggaaaggggcacgacgggctctaccagggactcagcaccgccaccaaagatacctacgacgccctgcatatgcaggcgctgccgccgcgc |
| Full length CD19-CD22 Dual CAR amino acid | 736 | MALPVTALLLPLALLLHAARPEVQLQQSGPGLVKPSQTLSLTCAISGDSMLSNSDTWNWIRQSPSRGLEWLGRTYHRSTWYDDYASSVRGRVSINVDTSKNQYSLQLNAVTPEDTGVYYCARVRLQDGNSWSDAFDVWGQGTMVTVSSGGGGSQSALTQPASASGSPGQSVTISCTGTSSDVGGYNYVSWYQQHPGKAPKLMIYDVSNRPSGVSNRFSGSKSGNTASLTISGLQAEDEADYYCSSYTSSSTLYVFGTGTQLTVLTTTPAPRPPTPAPTIASQPLSLRPEACRPAAGGAVHTRGLDFACDIYIWAPLAGTCGVLLLSLVITLYCKRGRKKLLYIFKQPFMRPVQTTQEEDGCSCRFPEEEEGGCELRVKFSRSADAPAYQQGQNQLYNELNLGRREEYDVLDKRRGRDPEMGGKPRRKNPQEGLYNELQKDKMAEAYSEIGMKGERRRGKGHDGLYQGLSTATKDTYDALHMQALPPRGSGATNFSLLKQAGDVEENPGPMALPVTALLLPLALLLHAARPEIVMTQSPATLSLSPGERATLSCRASQDISKYLNWYQQKPGQAPRLLIYHTSRLHSGIPARFSGSGSGTDYTLTISSLQPEDFAVYFCQQGNTLPYTFGQGTKLEIKGGGGSGGGGSGGGGSQVQLQESGPGLVKPSETLSLTCTVSGVSLPDYGVSWIRQPPGKGLEWIGVIWGSETTYYQSSLKSRVTISKDNSKNQVSLKLSSVTAADTAVYYCAKHYYYGGSYAMDYWGQGTLVTVSSTTTPAPRPPTPAPTIASQPLSLRPEACRPAAGGAVHTRGLDFACDIYIWAPLAGTCGVLLLSLVITLYCKRGRKKLLYIFKQPFMRPVQTTQEEDGCSCRFPEEEEGGCELRVKFSRSADAPAYQQGQNQLYNELNLGRREEYDVLDKRRGRDPEMGGKPRRKNPQEGLYNELQKDKMAEAYSEIGMKGERRRGKGHDGLYQGLSTATKDTYDALHMQALPPR |
| CD22 CAR (with P2A site) | 737 | MALPVTALLLPLALLLHAARPEVQLQQSGPGLVKPSQTLSLTCAISGDSMLSNSDTWNWIRQSPSRGLEWLGRTYHRSTWYDDYASSVRGRVSINVDTSKNQYSLQLNAVTPEDTGVYYCARVRLQDGNSWSDAFDVWGQGTMVTVSSGGGGSQSALTQPASASGSPGQSVTISCTGTSSDVGGYNYVSWYQQHPGKAPKLMIYDVSNRPSGVSNRFSGSKSGNTASLTISGLQAEDEADYYCSSYTSSSTLYVFGTGTQLTVLTTTPAPRPPTPAPTIASQPLSLRPEACRPAAGGAVHTRGLDFACDIYIWAPLAGTCGVLLLSLVITLYCKRGRKKLLYIFKQPFMRPVQTTQEEDGCSCRFPEEEEGGCELRVKFSRSADAPAYQQGQNQLYNELNLGRREEYDVLDKRRGRDPEMGGKPRRKNPQEGLYNELQKDKMAEAYSEIGMKGERRRGKGHDGLYQGLSTATKDTYDALHMQALPPRGSGATNFSLLKQAGDVEENPG |
| CD19 CAR | 738 | PMALPVTALLLPLALLLHAARPEIVMTQSPATLSLSPGERATLSCRASQDISKYLNWYQQKPGQAPRLLIYHTSRLHSGIPARFSGSGSGTDYTLTISSLQPEDFAVYFCQQGNTLPYTFGQGTKLEIKGGGGSGGGGSGGGGSQVQLQESGPGLVKPSETLSLTCTVSGVSLPDYGVSWIRQPPGKGLEWIGVIWGSETTYYQSSLKSRVTISKDNSKNQVSLKLSSVTAADTAVYYCAKHYYYGGSYAMDYWGQGTLVTVSSTTTPAPRPPTPAPTIASQPLSLRPEACRPAAGGAVHTRGLDFACDIYIWAPLAGTCGVLLLSLVITLYCKRGRKKLLYIFKQPFMRPVQTTQEEDGCSCRFPEEEEGGCELRVKFSRSADAPAYQQGQNQLYNELNLGRREEYDVLDKRRGRDPEMGGKPRRKNPQEGLYNELQKDKMAEAYSEIGMKGERRRGKGHDGLYQGLSTATKDTYDALHMQALPPR |

[0701] CD22 and CD19 CDRs of a dual CAR of the disclosure (e.g., a dual CAR molecule comprising (i) a first CAR that binds to CD22 and (ii) a second CAR that binds to CD19) are provided in Table 31.

TABLE 31

CD22 and CD19 CDR sequences

| Identifier | SEQ ID NO | Sequence |
|---|---|---|
| CD22 CDRs | | |
| HCDR1 (Kabat) | 289 | SNSDTWN |
| HCDR2 (Kabat) | 290 | RTYHRSTWYDDYASSVRG |
| HCDR3 (Kabat) | 291 | VRLQDGNSWSDAFDV |
| HCDR1 (Chothia) | 744 | GDSMLSNSD |
| HCDR2 (Chothia) | 745 | YHRSTWY |
| HCDR3 (Chothia) | 291 | VRLQDGNSWSDAFDV |
| HCDR1 (IMGT) | 746 | GDSMLSNSDT |
| HCDR2 (IMGT) | 747 | TYHRSTWYD |
| HCDR3 (IMGT) | 748 | ARVRLQDGNSWSDAFDV |
| LCDR1 (Kabat) | 95 | TGTSSDVGGYNYVS |
| LCDR2 (Kabat) | 96 | DVSNRPS |
| LCDR3 (Kabat) | 97 | SSYTSSSTLYV |
| LCDR1 (Chothia) | 98 | TSSDVGGYNY |
| LCDR2 (Chothia) | 99 | DVS |
| LCDR3 (Chothia) | 100 | YTSSSTLY |
| LCDR1 (IMGT) | 101 | SSDVGGYNY |
| LCDR2 (IMGT) | 99 | DVS |
| LCDR3 (IMGT) | 97 | SSYTSSSTLYV |
| CD19 CDRs | | |
| HCDR1 (Kabat) | 749 | GVSLPDYGVS |
| HCDR2 (Kabat) | 750 | VIWGSETTYYSSSLKS |
| | 304 | VIWGSETTYYQSSLKS |
| | 751 | VIWGSETTYYNSSLKS |
| HCDR3 (Kabat) | 297 | HYYYGGSYAMDY |
| LCDR1 | 298 | RASQDISKYLN |
| LCDR2 | 299 | HTSRLHS |
| LCDR3 | 300 | QQGNTLPYT |

[0702] Table 32 provides nucleotide and amino acid sequence for CD19 and CD22 binding domains of a dual CAR or a tandem CAR disclosed herein, e.g., a dual CAR or a tandem CAR comprising (i) a first CAR that binds to CD22 and (ii) a second CAR that binds to CD19.

TABLE 32

CD19 and CD22 binding domains

| Identifier | SEQ ID NO | Sequence |
|---|---|---|
| scFv CAR19 in c201, c203 and tandem CARs c171, c182, c188 | 752 | gaaattgtgatgacccagtcacccgccactcttagcctttcacccggtgagcgcgcaaccctgtcttgcagagcctcccaagacatctcaaaataccttaattggtatcaacagaagcccggacaggctcctcgccttctgatctaccacaccagccggctccattctggaatccctgccaggttcagcggtagcggatctgggaccgactacaccctcactatcagctcactgcagccagaggacttcgctgtctatttctgtcagcaagggaacaccctgccctacacctttggacagggcaccaagctcgagattaaaggtggaggtggcagcggaggaggtgggtccggcggtggaggaagccaggtccaactccaagaaagcggaccgggtcttgtgaagccatcagaaactctttcactgacttgtactgtgagcggagtgtctctccccgattacggggtgtcttggatcagacagccaccggggaagggtctggaatggattggagtgatttggggctctgagactacttactaccaatcatccctcaagtcacgcgtcaccatctcaaaggacaactctaagaatcaggtgtcactgaaactgtcatctgtgaccgcagccgacaccgccgtgtactattgcgctaagcattactattatggcgggagctacgcaatggattactggggacagggtactctggtcaccgtgtccagc |
| | 293 | EIVMTQSPATLSLSPGERATLSCRASQDISKYLNWYQQKPGQAPRLLIYHTSRLHSGIPARFSGSGSGTDYTLTISSLQPEDFAVYFCQQGNTLPYTFGQGTKLEIKGGGGSGGGGSGGGGSQVQLQESGPGLVKPSETLSLTCTVSGVSLPDYGVSWIRQPPGKGLEWIGVIWGSETTYYQSSLKSRVTISKDNSKNQVSLKLSSVTAADTAVYYCAKHYYYGGSYAMDYWGQGTLVTVSS |
| scFv CAR19 in c224 | 753 | gagattgtcatgactcagtccccggccacactctccctgtcacccggagaaagagcaaccctgagctgcagggcgtcccaggacatctcgaagtacctgaactggtaccagcagaagcctggacaagcaccccgcctcctgatctaccacacctcgcggctgcattcgggaatccccgccagattctcagggagcggatcaggaaccgactacaccctgactatctcgagcctgcaaccagaggatttcgccgtgtacttctgccagcaaggaaacaccctgccctacacctttggacagggaaccaagctcgagattaaggggggtggtggatcgggagggggtggatcaggaggaggcggctcacaagtccagctgcaagaatccggtccgggacttgtgaagccgtccgaaaccctgtcactgacttgcactgtgtccggggtgtcattgcccgactacggcgtgagctggattcggcagccccctggaaagggattggaatggatcggcgtgatctggggttcggaaactacctactatcagtcctcactgaagtcccgcgtgaccatcagcaaggataattccaaaaaccaagtgtctctgaagctctccagcgtcactgccgccgatactgccgtgtactactgcgccaagcactactattacggcggttcgtacgccatggactactggggccaagggacactcgtgaccgtgtcatcc |
| | 293 | EIVMTQSPATLSLSPGERATLSCRASQDISKYLNWYQQKPGQAPRLLIYHTSRLHSGIPARFSGSGSGTDYTLTISSLQPEDFAVYFCQQGNTLPYTFGQGTKLEIKGGGGSGGGGSGGGGSQVQLQESGPGLVKPSETLSLTCTVSGVSLPDYGVSWIRQPPGKGLEWIGVIWGSETTYYQSSLKSRVTISKDNSKNQVSLKLSSVTAADTAVYYCAKHYYYGGSYAMDYWGQGTLVTVSS |
| scFv CAR19 in c227 | 754 | caagtccagctgcaagaatccggtccgggacttgtgaagccgtccgaaaccctgtcactgacttgcactgtgtccggggtgtcattgcccgactacggcgtgagctggattcggcagccccctggaaagggattggaatggatcggcgtgatctggggttcggaaactacctactatcagtcctcactgaagtcccgcgtgaccatcagcaaggataattccaaaaaccaagtgtctctgaagctctccagcgtcactgccgccgatactgccgtgtactactgcgccaagcactactattacggcggttcgtacgccatggactactggggacaaggcactcttgtgactgtgtcaagcggcggtggagggagcggtgggggcggttcaggaggaggcggatcagagatcgtgatgacccaatccccagccaccctgtccctcagccctggagaaagagccaccctgagctgccgggcctcccaggatatcagcaagtacttgaactggtaccaacaaaagccggggcaggcgccccggctcctgatctaccacacctcgcgcctccactcaggtatccccgccagattctcagggagcggctccggtactgactacaccctgactatttcctcactgcagccagaggactttgccgtgtacttctgccagcagggaaacactctgccgtacaccttcgggcagggaacgaagcttgaaattaag |
| | 755 | QVQLQESGPGLVKPSETLSLTCTVSGVSLPDYGVSWIRQPPGKGLEWIGVIWGSETTYYQSSLKSRVTISKDNSKNQVSLKLSSVTAADTAVYYCAKHYYYGGSYAMDYWGQGTLVTVSSGGGGSGGGGSGGGGSEIVMTQSPATLSLSPGERATLSCRASQDISKYLNWYQQKPGQAPRLLIYHTSRLHSGIPARFSGSGSGTDYTLTISSLQPEDFAVYFCQQGNTLPYTFGQGTKLEIK |
| scFv CAR19 in c230 | 756 | gagattgtgatgactcagagcccggcgaccctgtccctgtcccccggggagagagcaaccctgtcgtgccgggcctcccaagacatctcaaagtacctcaattggtatcagcagaagccaggacaggctccacggttgctgatctaccacacttcgagactgcactcaggaatccccgcgcggttttccggttccggctccgggaccgactacaccctgaccatcagctcgctccagcctgaggatttcgcagtgtacttctgtcagcaaggaaacacccttccatacaccttcggacagggtaccaagctggaaatcaagggaggaggaggatctgggggcggtggttccggaggcggtggaagccaagtgcagctccaggaaagcggacccgggctggtcaagccgagcgaaaccctctcactgacttgtactgtgtccggagtgtccctgcctgactatggagtgtcctggatccgacagccccccggaaagggtctggagtggattggggtcatctggggctccgaaactacctactaccagagcagcctcaagagccgggtcaccatttcaaaggataactccaagaatcaagtgtccctgaagctgtcctcagtgacagccgcagacaccgccgtgtactactgcgccaagcactactactacggaggctcctacgcaatggactactggggacaaggcactttggtcactgtgtcaagc |
| | 293 | EIVMTQSPATLSLSPGERATLSCRASQDISKYLNWYQQKPGQAPRLLIYHTSRLHSGIPARFSGSGSGTDYTLTISSLQPEDFAVYFCQQGNTLPYTFGQGTKLEIKGGGGSGGGGSGGGGSQVQLQESGPGLVKPSETLSLTCTVSGVSLPDYGVSWIRQPPGKGLEWIGVIWGSETTYYQSSLKSRVTISKDNSKNQVSLKLSSVTAADTAVYYCAKHYYYGGSYAMDYWGQGTLVTVSS |
| ScFVCAR2 2 in c201 and c203 | 757 | gaagtgcagctgcagcagtcagggcctggcctggtcaagccgtcgcagaccctctccctgacatgcgccattagcggggactccatgctgagcaactcggacacctggaactggattcggcagtccccttcccggggactcgagtggctcggacgcacctaccatcggagcacttggtacgacgactacgcctcctccgtgagaggtcgcgtgtcgatcaacgtggatacctcgaagaaccagtatagcttgcaactgaacgccgtgacccctgaggataccggagtgtactattgtgcgagagtcaggctgcaagacggaaactcctggtccgacgcatttgatgtctggggacagggtactatggtcacggtgtcatctggaggcggaggatcgcaaagcgccctgactcagccggcttcggctagcggttcaccggggcagtccgtgactatctcctgcaccgggacttcctccgacgtgggaggctacaattacgtgtcctggtaccagcaacaccccggcaaagccccaaagctgatgatctacgacgtcagcaacagacccagcggagtgtccaaccggttcagcggctccaagtccggcaacaccgcctccctgaccatcagcgggcttcaggccgaagatgaggcggattactactgctcctcgtacacctcaagctcaactctgtacgtgttcggcaccggtactcagctcaccgtgctg |
| | 758 | EVQLQQSGPGLVKPSQTLSLTCAISGDSMLSNSDTWNWIRQSPSRGLEWLGRTYHRSTWYDDYASSVRGRVSINVDTSKNQYSLQLNAVTPEDTGVYYCARVRLQDGNSWSDAFDVWGQGTMVTVSSGGGGSQSALTQPASASGSPGQSVTISCTGTSSDVGGYNYVSWYQQHPGKAPKLMIYDVSNRPSGVSNRFSGSKSGNTASLTISGLQAEDEADYYCSSYTSSSTLYVFGTGTQLTVL |
| ScFVCAR2 2 in 230 | 759 | gaagtgcagctgcagcagtcaggaccgggcctggtcaaaccttcgcagactctgtccctgacttgcgctataagcggggactccatgctgagcaattcggacacttggaactggattcgccaaagccccagccggggtctggaatggctgggaaggacctaccatcgctctacttggtacgacgactacgccagctccgtgcgaggacgcgtgtccatcaacgtggacacctccaagaaccagtactcgcttcaactcaacgcagtgacccctgaagataccggagtctactattgcgcccgcgtgcggctccaggacgggaactcctggtcggacgctttcgatgtctggggacagggcactatggtcaccgtcagctccggcggcggcggtagccaatcggcgctgacacagccggcttccgcctcgggatcgcctggacagtcggtgaccatctcgtgcactggaacctcctccgacgtgggcggctacaattatgtgtcatggtaccagcagcacccgggaaaggcccctaagctgatgatctacgacgtgtccaatagacctagcggggtgtcaaacagattctccggatccaaatccggaaacactgcctccctgaccatttccggactgcaggccgaggacgaagccgattactactgctcctcttacacctcctcatccaccctctacgtgtttgggactgggacccagctgaccgtcctc |
| | 758 | EVQLQQSGPGLVKPSQTLSLTCAISGDSMLSNSDTWNWIRQSPSRGLEWLGRTYHRSTWYDDYASSVRGRVSINVDTSKNQYSLQLNAVTPEDTGVYYCARVRLQDGNSWSDAFDVWGQGTMVTVSSGGGGSQSALTQPASASGSPGQSVTISCTGTSSDVGGYNYVSWYQQHPGKAPKLMIYDVSNRPSGVSNRFSGSKSGNTASLTISGLQAEDEADYYCSSYTSSSTLYVFGTGTQLTVL |
| ScFVCAR2 2 in 171, c182 | 760 | gaagtgcagcttcaacaatcaggaccaggactcgtcaaaccatcacagaccctctccctcacatgtgccatctccggggactccatgttgagcaattccgacacttggaattggattagacaaagcccgtcccggggtctggaatggttgggacgcacctaccaccggtctacttggtacgacgactacgcgtcatccgtgcggggaagagtgtccatcaacgtggacacctccaagaaccagtacagcctgcagcttaatgccgtgactcctgaggatacgggcgtctactactgcgcccgcgtccgcctgcaagacgggaacagctggagcgatgcattcgatgtctggggccagggaactatggtcaccgtgtcgtctgggggcggtggatcgggtggcgggggttcggggggcggcggctctcagtccgctcttacccaaccggcctcagcctcggggagccccggccagagcgtgaccatttcctgcaccggcacttcatccgacgtgggcggctacaactacgtgtcctggtaccaacagcacccgggaaaggcccccaagctcatgatctacgacgtgtccaacaggccctcgggagtgtccaaccggttctcgggttcgaaatcgggaaacacagccagcctgaccatcagcggactgcaggctgaagatgaagccgactactactgctcctcctacacctcgtcatccacgctctacgtgttcggcactggaactcagctgactgtgctg |
| | 285 | EVQLQQSGPGLVKPSQTLSLTCAISGDSMLSNSDTWNWIRQSPSRGLEWLGRTYHRSTWYDDYASSVRGRVSINVDTSKNQYSLQLNAVTPEDTGVYYCARVRLQDGNSWSDAFDVWGQGTMVTVSSGGGGSGGGGSGGGGSQSALTQPASASGSPGQSVTISCTGTSSDVGGYNYVSWYQQHPGKAPKLMIYDVSNRPSGVSNRFSGSKSGNTASLTISGLQAEDEADYYCSSYTSSSTLYVFGTGTQLTVL |
| ScFVCAR2 2 in c188 | 761 | cagtccgctcttacccaaccggcctcagcctcggggagccccggccagagcgtgaccatttcctgcaccggcacttcatccgacgtgggcggctacaactacgtgtcctggtaccaacagcacccgggaaaggcccccaagctcatgatctacgacgtgtccaacaggccctcgggagtgtccaaccggttctcgggttcgaaatcgggaaacacagccagcctgaccatcagcggactgcaggctgaagatgaagccgactactactgctcctcctacacctcgtcatccacgctctacgtgttcggcactggaactcagctgactgtgctgggcggaggaggctccgaagtgcagcttcaacaatcaggaccaggactcgtcaaaccatcacagaccctctccctcacatgtgccatctccggggactccatgttgagcaattccgacacttggaattggattagacaaagcccgtcccggggtctggaatggttgggacgcacctaccaccggtctacttggtacgacgactacgcgtcatccgtgcggggaagagtgtccatcaacgtggacacctccaagaaccagtacagcctgcagcttaatgccgtgactcctgaggatacgggcgtctactactgcgcccgcgtccgcctgcaagacgggaacagctggagcgatgcattcgatgtctggggccagggaactatggtcaccgtgtcgtct |
| | 762 | QSALTQPASASGSPGQSVTISCTGTSSDVGGYNYVSWYQQHPGKAPKLMIYDVSNRPSGVSNRFSGSKSGNTASLTISGLQAEDEADYYCSSYTSSSTLYVFGTGTQLTVLGGGGSEVQLQQSGPGLVKPSQTLSLTCAISGDSMLSNSDTWNWIRQSPSRGLEWLGRTYHRSTWYDDYASSVRGRVSINVDTSKNQYSLQLNAVTPEDTGVYYCARVRLQDGNSWSDAFDVWGQGTMVTVSS |
| ScFVCAR2 2 in c224 | 763 | cagtccgctctgactcagccggcctcagcttcggggtcccctggtcaaagcgtcactatttcctgtaccggaacctcatcagacgtgggcggctacaattacgtgtcctggtaccaacagcaccccggaaaggctcctaagcttatgatctacgacgtgtccaaccggccgtcaggagtgtccaacagattctccggctccaagagcggaaacactgccagcttgaccattagcggcttgcaggccgaggacgaagccgactactactgctctagctacacatcctcgtctaccctctacgtgtttggaacggggacccagctgactgtgctcgggggtggaggatcagaggtgcaactccagcagtccggtcctggcctcgtgaaaccgtcccaaaccctgtccctgacttgcgccatctcgggcgactccatgctgtccaattccgacacctggaactggattagacaatcgcctagccggggactcgaatggctgggccggacctaccaccggtccacgtggtatgacgactacgcaagctccgtccggggaagggtgtccattaacgtcgatacctccaagaaccagtacagccttcagctgaacgctgtgacccccgaggataccggcgtctactactgtgcaagagtgcgattgcaggatggaaactcgtggtcggacgcattcgatgtctggggacagggaactatggtgaccgtgtcctcg |
| | 762 | QSALTQPASASGSPGQSVTISCTGTSSDVGGYNYVSWYQQHPGKAPKLMIYDVSNRPSGVSNRFSGSKSGNTASLTISGLQAEDEADYYCSSYTSSSTLYVFGTGTQLTVLGGGGSEVQLQQSGPGLVKPSQTLSLTCAISGDSMLSNSDTWNWIRQSPSRGLEWLGRTYHRSTWYDDYASSVRGRVSINVDTSKNQYSLQLNAVTPEDTGVYYCARVRLQDGNSWSDAFDVWGQGTMVTVSS |
| ScFVCAR2 2 in c227 | 764 | cagtccgctctgactcagccggcctcagcttcggggtcccctggtcaaagcgtcactatttcctgtaccggaacctcatcagacgtgggcggctacaattacgtgtcctggtaccaacagcaccccggaaaggctcctaagcttatgatctacgacgtgtccaaccggccgtcaggagtgtccaacagattctccggctccaagagcggaaacactgccagcttgaccattagcggcttgcaggccgaggacgaagccgactactactgctctagctacacatcctcgtctaccctctacgtgtttggaacggggacccagctgactgtgctcgggggtggaggatcagaggtgcaactccagcagtccggtcctggcctcgtgaaaccgtcccaaaccctgtccctgacttgcgccatctcgggcgactccatgctgtccaattccgacacctggaactggattagacaatcgcctagccggggactcgaatggctgggccggacctaccaccggtccacgtggtatgacgactacgcaagctccgtccggggaagggtgtccattaacgtcgatacctccaagaaccagtacagccttcagctgaacgctgtgacccccgaggataccggcgtctactactgtgcaagagtgcgattgcaggatggaaactcgtggtcggacgcattcgatgtctggggacagggaactatggtcactgtgtcctcc |
| | 762 | QSALTQPASASGSPGQSVTISCTGTSSDVGGYNYVSWYQQHPGKAPKLMIYDVSNRPSGVSNRFSGSKSGNTASLTISGLQAEDEADYYCSSYTSSSTLYVFGTGTQLTVLGGGGSEVQLQQSGPGLVKPSQTLSLTCAISGDSMLSNSDTWNWIRQSPSRGLEWLGRTYHRSTWYDDYASSVRGRVSINVDTSKNQYSLQLNAVTPEDTGVYYCARVRLQDGNSWSDAFDVWGQGTMVTVSS |

[0703] Table 33 provides nucleotide and amino acid sequences for additional CAR components, e.g., signal peptide, linkers and P2A sites, that can be used in a CAR molecule, e.g., a dual CAR molecule described herein (for example, a dual CAR molecule comprising (i) a first CAR that binds to CD22 and (ii) a second CAR that binds to CD19).

TABLE 33

Additional CAR components

| Identifier | SEQ ID NO | Sequence |
|---|---|---|
| Signal peptide for CAR22 in c201, c203, and tandem CARs c171, c182, c188 | 199 | atggccctccctgtcaccgccctgctgcttccgctggctcttctgctccacgccgctcggccc |
| | 1 | MALPVTALLLPLALLLHAARP |
| Signal peptide in tandem CARs c224, c227 | 765 | atggccctgcccgtgactgcgctcctgcttccgttggccctgctcctgcatgccgccagacct |
| | 1 | MALPVTALLLPLALLLHAARP |
| Signal peptide CAR19 in c201 and c203 | 766 | atggccttaccagtgaccgccttgctcctgccgctggccttgctgctccacgccgccaggccg |
| | 1 | MALPVTALLLPLALLLHAARP |
| Signal peptide CAR22 in c230 | 767 | atggcacttcccgtcaccgccctgctgctcccactcgccctccttctgcacgccgcccgcccc |
| | 1 | MALPVTALLLPLALLLHAARP |
| Signal peptide CAR19 in c230 | 768 | atggccctgccagtgaccgcgctcctgctgcccctggctctgctgcttcacgcggcccggcct |
| | 1 | MALPVTALLLPLALLLHAARP |
| CD8 hinge and transmembrane CAR22 in c201 and c203, and in tandem CARs c171, c182, c188, c224, c227 | 769 | accactaccccagcaccgaggccacccaccccggctcctaccatcgcctcccagcctctgtccctgcgtccggaggcatgtagacccgcagctggtggggccgtgcatacccggggtcttgacttcgcctgcgatatctacatttgggcccctctggctggtacttgcggggtcctgctgctttcactcgtgatcactctttactgt |
| | 202 | TTTPAPRPPTPAPTIASQPLSLRPEACRPAAGGAVHTRGLDFACDIYIWAPLAGTCGVLLLSLVITLYC |
| CD8 hinge and transmembrane CAR22 In c230 | 770 | actaccaccccggccccgcggccccctacaccggcaccgactattgccagccagcctctctcgctgcggccggaggcctgccgcccagccgccggcggagccgtgcacacccgcggtctggacttcgcgtgcgatatctacatctgggctccgctggccgggacttgtggcgtgctgctgctgtctctggtcatcacactgtactgc |
| | 202 | TTTPAPRPPTPAPTIASQPLSLRPEACRPAAGGAVHTRGLDFACDIYIWAPLAGTCGVLLLSLVITLYC |
| CD8 hinge and transmembrane | 771 | accacgacgccagcgccgcgaccaccaacaccggcgcccaccatcgcgtcgcagcccctgtccctgcgcccagaggcgtgccggccagcggcggggggcgcagtgcacacgag |
| CAR19 in c201 and c203 | | ggggctggacttcgcctgtgatatctacatctgggcgcccttggccgggacttgtggggtccttctcctgtcactggttatcaccctttactgc |
| | 202 | TTTPAPRPPTPAPTIASQPLSLRPEACRPAAGGAVHTRGLDFACDIYIWAPLAGTCGVLLLSLVITLYC |
| CD8 hinge and transmembrane CAR19 In c230 | 772 | accaccacccctgcgcctcggcctcctaccccggctcccactatcgcgagccagccgctgagcctgcggcctgaggcttgccgaccggccgctggcggcgccgtgcatactcggggcctcgactttgcctgtgacatctacatctgggcccccctggccggaacgtgcggagtgctgctgctgtcgctggtcattaccctgtattgc |
| | 202 | TTTPAPRPPTPAPTIASQPLSLRPEACRPAAGGAVHTRGLDFACDIYIWAPLAGTCGVLLLSLVITLYC |
| 4-1BB CAR22 in c201 and c203, and tandem CARs c171, c182, c188, c224, c227 | 773 | aagcgcggtcggaagaagctgctgtacatctttaagcaacccttcatgaggcctgtgcagactactcaagaggaggacggctgttcatgccggttcccagaggaggaggaaggcggctgcgaactg |
| | 7 | KRGRKKLLYIFKQPFMRPVQTTQEEDGCSCRFPEEEEGGCEL |
| 4-1BB CAR19 in c201 and c203 | 18 | aaacggggcagaaagaaactcctgtatatattcaaacaaccatttatgagaccagtacaaactactcaagaggaagatggctgtagctgccgatttccagaagaagaagaaggaggatgtgaactg |
| | 7 | KRGRKKLLYIFKQPFMRPVQTTQEEDGCSCRFPEEEEGGCEL |
| 4-1BB CAR22 in c230 | 774 | aagcgcggaagaaagaagctgctctacatcttcaagcaacccttcatgcggcctgtgcagaccacccaggaagaggatggctgctcctgccggttcccggaggaagaagagggcggatgcgaactg |
| | 7 | KRGRKKLLYIFKQPFMRPVQTTQEEDGCSCRFPEEEEGGCEL |
| 4-1BB CAR19 in c230 | 775 | aaacgcggaaggaagaagctgttgtacattttcaagcagcccttcatgcgcccggtgcaaactactcaggaggaagatggctgttcctgtcggttccccgaagaggaagaaggcggctgcgagttg |
| | 7 | KRGRKKLLYIFKQPFMRPVQTTQEEDGCSCRFPEEEEGGCEL |
| CD3zeta CAR22 in c201 and c203, and tandem CARs 171, c182, c188, c224, c227 | 776 | cgcgtgaaattcagccgcagcgcagatgctccagcctaccagcaggggcagaaccagctctacaacgaactcaatcttggtcggagagaggagtacgacgtgctggacaagcggagaggacgggacccagaaatgggcgggaagccgcgcagaaagaatccccaagagggcctgtacaacgagctccaaaaggataagatggcagaagcctatagcgagattggtatgaaaggggaacgcagaagaggcaaaggccacgacggactgtaccagggactcagcaccgccaccaaggacacctatgacgctcttcacatgcaggccctgccgcctcgg |
| | 10 | RVKFSRSADAPAYQQGQNQLYNELNLGRREEYDVLDKRRGRDPEMGGKPRRKNPQEGLYNELQKDKMAEAYSEIGMKGERRRGKGHDGLYQGLSTATKDTYDALHMQALPPR |
| CD3zeta CAR19 in c201 and c203 | 21 | agagtgaagttcagcaggagcgcagacgcccccgcgtaccagcagggccagaaccagctctataacgagctcaatctaggacgaagagaggagtacgatgttttggacaagagacgtggccgggaccctgagatggggggaaagccgagaaggaagaaccctcaggaaggcctgtacaatgaactgcagaaagataagatggcggaggcctacagtgagattgggatgaaaggcgagcgccggaggggcaaggggcacgatggcctttaccagggtctcagtacagccaccaaggacacctacgacgcccttcacatgcaggccctgccccctcgc |
| | 10 | RVKFSRSADAPAYQQGQNQLYNELNLGRREEYDVLDKRRGRDPEMGGKPRRKNPQEGLYNELQKDKMAEAYSEIGMKGERRRGKGHDGLYQGLSTATKDTYDALHMQALPPR |
| CD3zeta CAR22 in c230 | 777 | cgcgtgaagttcagccgaagcgccgacgccccggcctaccagcagggccagaaccaactgtacaacgaactcaacctgggtcggagagaagagtacgacgtgctggacaaaagacgcggcagggaccccgagatgggcggaaagcctcgccgcaagaacccgcaggagggcctctacaacgagctgcagaaggacaagatggccgaagcctactcagagatcggcatgaagggggagcggaggcgcgggaagggccacgacggtttgtaccaaggactttccactgcgaccaaggacacctacgatgccctccatatgcaagccctgccgccccgg |
| | 10 | RVKFSRSADAPAYQQGQNQLYNELNLGRREEYDVLDKRRGRDPEMGGKPRRKNPQEGLYNELQKDKMAEAYSEIGMKGERRRGKGHDGLYQGLSTATKDTYDALHMQALPPR |
| CD3zeta CAR19 in c230 | 778 | agggtcaagttctcccggtccgccgatgctcccgcctaccaacaggggcagaaccagctttataacgaactgaacctgggcaggagggaggaatatgatgtgttggataagcgccggggccgggacccagaaatggggggaaagcccagaagaaagaaccctcaagagggactttacaacgaattgcagaaagacaaaatggccgaggcctactccgagattgggatgaagggcgaaagacggagaggaaaggggcacgacgggctctaccagggactcagcaccgccaccaaagatacctacgacgccctgcatatgcaggcgctgccgccgcgc |
| | 10 | RVKFSRSADAPAYQQGQNQLYNELNLGRREEYDVLDKRRGRDPEMGGKPRRKNPQEGLYNELQKDKMAEAYSEIGMKGERRRGKGHDGLYQGLSTATKDTYDALHMQALPPR |
| Linker between scFVs in c171 | 779 | ttggcagaagccgccgcgaaa |
| | 308 | LAEAAAK |
| Linker between scFVs in c182, c188 | 780 | ggtggaggtggcagcggaggaggtgggtccggcggtggaggaagc |
| | 104 | GGGGSGGGGSGGGGS |
| Linker between scFVs in c224 | 781 | ggcggaggcgggagcggaggaggaggctctggcggaggaggaagc |
| | 104 | GGGGSGGGGSGGGGS |
| Linker between scFVs in c227 | 782 | ggcggtggaggctcgggggggggcggctcaggaggaggcggctca |
| | 104 | GGGGSGGGGSGGGGS |
| P2A in c201, c203 | 783 | ggaagcggagctactaacttcagcctgctgaagcaggctggagacgtggaggagaaccctggacct |
| | 784 | GSGATNFSLLKQAGDVEENPGP |
| P2A in c230 | 785 | ggttccggagctaccaacttctcgctgttgaagcaggccggagatgtcgaggaaaacccgggacct |
| | 784 | GSGATNFSLLKQAGDVEENPGP |
| Gly4Ser linker | 786 | Ggtggaggtggcagc |
| | 25 | GGGGS |

[0704] In some embodiments, the CAR-expressing cell comprises a first CAR that targets a first antigen and includes an intracellular signaling domain having a costimulatory signaling domain but not a primary signaling domain, and a second CAR that targets a second, different, antigen and includes an intracellular signaling domain having a primary signaling domain but not a costimulatory signaling domain. Placement of a costimulatory signaling domain, for example, 4-1BB, CD28, CD27, OX-40 or ICOS, onto the first CAR, and the primary signaling domain, for example, CD3 zeta, on the second CAR can limit the CAR activity to cells where both targets are expressed. In some embodiments, the CAR expressing cell comprises a first CAR that includes an antigen binding domain, a transmembrane domain and a costimulatory domain and a second CAR that targets another antigen and includes an antigen binding domain, a transmembrane domain and a primary signaling domain. In some embodiments, the CAR expressing cell comprises a first CAR that includes an antigen binding domain, a transmembrane domain and a primary signaling domain and a second CAR that targets another antigen and includes an antigen binding domain to the antigen, a transmembrane domain and a costimulatory signaling domain.

[0705] In some embodiments, the CAR-expressing cell comprises an XCAR described herein and an inhibitory CAR. In some embodiments, the inhibitory CAR comprises an antigen binding domain that binds an antigen found on normal cells but not cancer cells, for example, normal cells that also express X. In some embodiments, the inhibitory CAR comprises the antigen binding domain, a transmembrane domain and an intracellular domain of an inhibitory molecule. For example, the intracellular domain of the inhibitory CAR can be an intracellular domain of PD1, PD-L1, PD-L2, CTLA4, TIM3, CEACAM (CEACAM-1, CEACAM-3, and/or CEACAM-5), LAG3, VISTA, BTLA, TIGIT, LAIR1, CD160, 2B4, CD80, CD86, B7-H3 (CD276), B7-H4 (VTCN1), HVEM (TNFRSF14 or CD270), KIR, A2aR, MHC class I, MHC class II, GAL9, adenosine, and TGF (for example, TGF beta).

[0706] In some embodiments, when the CAR-expressing cell comprises two or more different CARs, the antigen binding domains of the different CARs can be such that the antigen binding domains do not interact with one another. For example, a cell expressing a first and second CAR can have an antigen binding domain of the first CAR, for example, as a fragment, for example, an scFv, that does not form an association with the antigen binding domain of the second CAR, for example, the antigen binding domain of the second CAR is a VHH.

[0707] In some embodiments, the antigen binding domain comprises a single domain antigen binding (SDAB) molecules include molecules whose complementary determining regions are part of a single domain polypeptide. Examples include, but are not limited to, heavy chain variable domains, binding molecules naturally devoid of light chains, single domains derived from conventional 4-chain antibodies, engineered domains and single domain scaffolds other than those derived from antibodies. SDAB molecules may be any of the art, or any future single domain molecules. SDAB molecules may be derived from any species including, but not limited to mouse, human, camel, llama, lamprey, fish, shark, goat, rabbit, and bovine. This term also includes naturally occurring single domain antibody molecules from species other than Camelidae and sharks.

[0708] In some embodiments, an SDAB molecule can be derived from a variable region of the immunoglobulin found in fish, such as, for example, that which is derived from the immunoglobulin isotype known as Novel Antigen Receptor (NAR) found in the serum of shark. Methods of producing single domain molecules derived from a variable region of NAR (“IgNARs”) are described in WO 03/014161 and Streltsov (2005) Protein Sci. 14:2901-2909.

[0709] In some embodiments, an SDAB molecule is a naturally occurring single domain antigen binding molecule known as heavy chain devoid of light chains. Such single domain molecules are disclosed in WO 9404678 and Hamers-Casterman, C. et al. (1993) Nature 363:446-448, for example. For clarity reasons, this variable domain derived from a heavy chain molecule naturally devoid of light chain is known herein as a VHH or nanobody to distinguish it from the conventional VH of four chain immunoglobulins. Such a VHH molecule can be derived from Camelidae species, for example in camel, llama, dromedary, alpaca and guanaco. Other species besides Camelidae may produce heavy chain molecules naturally devoid of light chain; such VHHs are within the scope of the invention.

[0710] The SDAB molecules can be recombinant, CDR-grafted, humanized, camelized, de-immunized and/or in vitro generated (for example, selected by phage display).

[0711] It has also been discovered, that cells having a plurality of chimeric membrane embedded receptors comprising an antigen binding domain that interactions between the antigen binding domain of the receptors can be undesirable, for example, because it inhibits the ability of one or more of the antigen binding domains to bind its cognate antigen. Accordingly, disclosed herein are cells having a first and a second non-naturally occurring chimeric membrane embedded receptor comprising antigen binding domains that minimize such interactions. Also disclosed herein are nucleic acids encoding a first and a second non-naturally occurring chimeric membrane embedded receptor comprising an antigen binding domains that minimize such interactions, as well as methods of making and using such cells and nucleic acids. In some embodiments the antigen binding domain of one of the first and the second non-naturally occurring chimeric membrane embedded receptor, comprises an scFv, and the other comprises a single VH domain, for example, a camelid, shark, or lamprey single VH domain, or a single VH domain derived from a human or mouse sequence.

[0712] In some embodiments, a composition herein comprises a first and second CAR, wherein the antigen binding domain of one of the first and the second CAR does not comprise a variable light domain and a variable heavy domain. In some embodiments, the antigen binding domain of one of the first and the second CAR is an scFv, and the other is not an scFv. In some embodiments, the antigen binding domain of one of the first and the second CAR comprises a single VH domain, for example, a camelid, shark, or lamprey single VH domain, or a single VH domain derived from a human or mouse sequence. In some embodiments, the antigen binding domain of one of the first and the second CAR comprises a nanobody. In some embodiments, the antigen binding domain of one of the first and the second CAR comprises a camelid VHH domain.

[0713] In some embodiments, the antigen binding domain of one of the first and the second CAR comprises an scFv, and the other comprises a single VH domain, for example, a camelid, shark, or lamprey single VH domain, or a single VH domain derived from a human or mouse sequence. In some embodiments, the antigen binding domain of one of the first and the second CAR comprises an scFv, and the other comprises a nanobody. In some embodiments, the antigen binding domain of one of the first and the second CAR comprises an scFv, and the other comprises a camelid VHH domain.

[0714] In some embodiments, when present on the surface of a cell, binding of the antigen binding domain of the first CAR to its cognate antigen is not substantially reduced by the presence of the second CAR. In some embodiments, binding of the antigen binding domain of the first CAR to its cognate antigen in the presence of the second CAR is at least 85%, 90%, 95%, 96%, 97%, 98% or 99%, for example, 85%, 90%, 95%, 96%, 97%, 98% or 99% of binding of the antigen binding domain of the first CAR to its cognate antigen in the absence of the second CAR.

[0715] In some embodiments, when present on the surface of a cell, the antigen binding domains of the first and the second CAR, associate with one another less than if both were scFv antigen binding domains. In some embodiments, the antigen binding domains of the first and the second CAR, associate with one another at least 85%, 90%, 95%, 96%, 97%, 98% or 99% less than, for example, 85%, 90%, 95%, 96%, 97%, 98% or 99% less than if both were scFv antigen binding domains.

### Co-Expression of an Agent That Enhances CAR Activity

[0716] In some embodiments, the CAR-expressing cell described herein can further express another agent, for example, an agent that enhances the activity or fitness of a CAR-expressing cell.

[0717] For example, in some embodiments, the agent can be an agent which inhibits a molecule that modulates or regulates, for example, inhibits, T cell function. In some embodiments, the molecule that modulates or regulates T cell function is an inhibitory molecule. Inhibitory molecules, for example, PD1, can, in some embodiments, decrease the ability of a CAR-expressing cell to mount an immune effector response. Examples of inhibitory molecules include PD1, PD-L1, CTLA4, TIM3, LAG3, VISTA, BTLA, TIGIT, LAIR1, CD160, 2B4, CD80, CD86, B7-H3 (CD276), B7-H4 (VTCN1), HVEM (TNFRSF14 or CD270), KIR, A2aR, MHC class I, MHC class II, GAL9, adenosine, or TGF beta.

[0718] In embodiments, an agent, for example, an inhibitory nucleic acid, for example, a dsRNA, for example, an siRNA or shRNA; or for example, an inhibitory protein or system, for example, a clustered regularly interspaced short palindromic repeats (CRISPR), a transcription-activator like effector nuclease (TALEN), or a zinc finger endonuclease (ZFN), for example, as described herein, can be used to inhibit expression of a molecule that modulates or regulates, for example, inhibits, T-cell function in the CAR-expressing cell. In some embodiments the agent is an shRNA, for example, an shRNA described herein. In some embodiments, the agent that modulates or regulates, for example, inhibits, T-cell function is inhibited within a CAR-expressing cell. For example, a dsRNA molecule that inhibits expression of a molecule that modulates or regulates, for example, inhibits, T-cell function is linked to the nucleic acid that encodes a component, for example, all of the components, of the CAR.

[0719] In some embodiments, the agent which inhibits an inhibitory molecule comprises a first polypeptide, for example, an inhibitory molecule, associated with a second polypeptide that provides a positive signal to the cell, for example, an intracellular signaling domain described herein. In some embodiments, the agent comprises a first polypeptide, for example, of an inhibitory molecule such as PD1, PD-L1, CTLA4, TIM3, LAG3, VISTA, BTLA, TIGIT, LAIR1, CD160, 2B4, CD80, CD86, B7-H3 (CD276), B7-H4 (VTCN1), HVEM (TNFRSF14 or CD270), KIR, A2aR, MHC class I, MHC class II, GAL9, adenosine, or TGF beta, or a fragment of any of these (for example, at least a portion of an extracellular domain of any of these), and a second polypeptide which is an intracellular signaling domain described herein (for example, comprising a costimulatory domain (for example, 41BB, CD27 or CD28, for example, as described herein) and/or a primary signaling domain (for example, a CD3 zeta signaling domain described herein). In some embodiments, the agent comprises a first polypeptide of PD1 or a fragment thereof (for example, at least a portion of an extracellular domain of PD1), and a second polypeptide of an intracellular signaling domain described herein (for example, a CD28 signaling domain described herein and/or a CD3 zeta signaling domain described herein). PD1 is an inhibitory member of the CD28 family of receptors that also includes CD28, CTLA-4, ICOS, and BTLA. PD-1 is expressed on activated B cells, T cells and myeloid cells (Agata et al. 1996 Int. Immunol 8:765-75). Two ligands for PD1, PD-L1 and PD-L2 have been shown to downregulate T cell activation upon binding to PD1 (Freeman et a. 2000 J Exp Med 192:1027-34; Latchman et al. 2001 Nat Immunol 2:261-8; Carter et al. 2002 Eur J Immunol 32:634-43). PD-L1 is abundant in human cancers (Dong et al. 2003 J Mol Med 81:281-7; Blank et al. 2005 Cancer Immunol. Immunother 54:307-314; Konishi et al. 2004 Clin Cancer Res 10:5094). Immune suppression can be reversed by inhibiting the local interaction of PD1 with PD-L1.

[0720] In some embodiments, the agent comprises the extracellular domain (ECD) of an inhibitory molecule, for example, Programmed Death 1 (PD1), can be fused to a transmembrane domain and intracellular signaling domains such as 41BB and CD3 zeta (also referred to herein as a PD1 CAR). In some embodiments, the PD1 CAR, when used in combinations with an XCAR described herein, improves the persistence of the T cell. In some embodiments, the CAR is a PD1 CAR comprising the extracellular domain of PD1 indicated as underlined in SEQ ID NO: 24. In some embodiments, the PD1 CAR comprises the amino acid sequence of SEQ ID NO: 24.

[0721] In some embodiments, the PD1 CAR comprises the amino acid sequence of SEQ ID NO: 22.

[0722] In some embodiments, the agent comprises a nucleic acid sequence encoding the PD1 CAR, for example, the PD1 CAR described herein. In some embodiments, the nucleic acid sequence for the PD1 CAR is provided as SEQ ID NO: 23, with the PD1 ECD underlined.

[0723] In another example, in some embodiments, the agent which enhances the activity of a CAR-expressing cell can be a costimulatory molecule or costimulatory molecule ligand. Examples of costimulatory molecules include MHC class I molecule, BTLA and a Toll ligand receptor, as well as OX40, CD27, CD28, CDS, ICAM-1, LFA-1 (CD11a/CD18), ICOS (CD278), and 4-1BB (CD137). Further examples of such costimulatory molecules include CDS, ICAM-1, GITR, BAFFR, HVEM (LIGHTR), SLAMF7, NKp80 (KLRF1), NKp44, NKp30, NKp46, CD160, CD19, CD4, CD8alpha, CD8beta, IL2R beta, IL2R gamma, IL7R alpha, ITGA4, VLA1, CD49a, ITGA4, IA4, CD49D, ITGA6, VLA-6, CD49f, ITGAD, CD11d, ITGAE, CD103, ITGAL, CD11a, LFA-1, ITGAM, CD11b, ITGAX, CD11c, ITGB1, CD29, ITGB2, CD18, LFA-1, ITGB7, NKG2D, NKG2C, TNFR2, TRANCE/RANKL, DNAM1 (CD226), SLAMF4 (CD244, 2B4), CD84, CD96 (Tactile), CEACAM1, CRTAM, Ly9 (CD229), CD160 (BY55), PSGL1, CD100 (SEMA4D), CD69, SLAMF6 (NTB-A, Ly108), SLAM (SLAMF1, CD150, IPO-3), BLAME (SLAMF8), SELPLG (CD162), LTBR, LAT, GADS, SLP-76, PAG/Cbp, CD19a, and a ligand that specifically binds with CD83., for example, as described herein. Examples of costimulatory molecule ligands include CD80, CD86, CD40L, ICOSL, CD70, OX40L, 4-1BBL, GITRL, and LIGHT. In embodiments, the costimulatory molecule ligand is a ligand for a costimulatory molecule different from the costimulatory molecule domain of the CAR. In embodiments, the co stimulatory molecule ligand is a ligand for a costimulatory molecule that is the same as the costimulatory molecule domain of the CAR. In some embodiments, the costimulatory molecule ligand is 4-1BBL. In some embodiments, the costimulatory ligand is CD80 or CD86. In some embodiments, the costimulatory molecule ligand is CD70. In embodiments, a CAR-expressing immune effector cell described herein can be further engineered to express one or more additional costimulatory molecules or costimulatory molecule ligands.

### TET2 shRNA

[0724] For example, in some embodiments, the agent can be an agent which inhibits expression of a target that enhances CAR-T cell function - for example, by (i) enhancing proliferation and/or (ii) regulating effector function through regulation of cytokine production and/or degranulation. In some embodiments, an agent, for example, an inhibitory nucleic acid, for example, a dsRNA, for example, an siRNA or shRNA; or for example, an inhibitory protein or system, for example, a clustered regularly interspaced short palindromic repeats (CRISPR), a transcription-activator like effector nuclease (TALEN), or a zinc finger endonuclease (ZFN), for example, as described herein, can be used to inhibit expression of a target that enhances CAR T-cell function. In some embodiments, the target is Tet2. In some embodiments the agent is an shRNA, for example, an shRNA that targets Tet2, comprising a sense strand comprising a Tet2 target sequence and an anti-sense strand complementary to the sense strand in whole or in part. In some embodiments, the shRNA is encoded in a vector; this vector may be the same or different from the vector encoding a CAR disclosed herein. In some embodiments, the vector encoding the shRNA comprises a promoter, a sense strand comprising a Tet2 target sequence, a loop, an anti-sense strand complementary to the sense strand in whole or in part, and, optionally, a polyT tail. In some embodiments, the promoter is a U6 promoter, optionally a human U6 promoter. Sequences of and methods of using U6 promoters for shRNA are known in the art and are found, for example, in Gao et al. Transcription, 8(5):275-287, 2017; Kunkel & Pederson, Genes & Dev 2:196-204, 1988; Goomer & Kunkel Nucleic Acid Res. 20:4903-4912, 1992; and Ma et al Molecular Therapy-Nucleic Acids 3:e161, 2014, all of which are incorporated by reference herein. Non-limiting examples of U6 promoter sequences (with the TATA box underlined) include:

TATATATCTTGTGGAAAGGACGAAACACC (SEQ ID NO: 787)
TATATATCTTGTGGAAAGGACGAAACACCG (SEQ ID NO: 788)
TTATATATCTTGTGGAAAGGACGAAACACC (SEQ ID NO: 789)
TTATATATCTTGTGGAAAGGACGAAACACCA (SEQ ID NO: 790)
TTATATATCTTGTGGAAAGGACGAAACACCG (SEQ ID NO: 791)

[0725] In some embodiments, the sense strand comprising a Tet2 target sequence comprises 19, 20, or 21 nucleotides. In some embodiments, the anti-sense strand complementary to the sense strand in whole or in part comprises 19, 20, or 21 nucleotides, optionally, the same length as the sense strand. In some embodiments, the anti-sense strand complementary is complementary (when read from 3′ to 5′) to the sense strand comprising a Tet2 target sequence in part, for example, from, at least, positions 2 to 18 or from positions 1 to 9 and 11 to 19, 20, or 21. In some embodiments, the anti-sense strand complementary to the sense strand to the sense strand comprising a Tet2 target sequence is complementary (when read from 3′ to 5′) to the sense strand comprising a Tet2 target sequence in whole, i.e. over the entire length of the sense strand comprising a Tet2 target sequence, e.g., positions 1 to 19, 1 to 20, or 1 to 21. In some embodiments, the sense strand comprises one or more of the Tet2 target sequences provided in Table 4 of WO2017/049166, incorporated by reference herein. Non-limiting exemplary Tet2 target sequences include:

GGGTAAGCCAAGAAAGAAA (SEQ ID NO: 418)
TTTCTTTCTTGGCTTACCC (SEQ ID NO: 419)

[0726] The anti-sense strand, a reverse complement of SEQ ID NO: 418, is provided above as SEQ ID NO: 419, although it is noted that determination thereof can be readily performed based on skill in the art (for example, using the Sequence Manipulation Site available at bioinformations.org/sms2/rev_comp.html. In some embodiments, the loop is selected from sequences known in the art, such as but not limited to those disclosed in Bofill-De Ros & Gu, Methods 103: 157-166, 2016; Gu et al. Cell 151(4): 900-911, 2012; Cullen, Gene Ther.13:503-508, 2006; and Schopman et al Antiviral Res. 86:204-211, 2014, all of which are incorporated by reference herein. Non-limiting exemplary loop sequences include:

GTTAATATTCATAGC (SEQ ID NO: 792)
CCTGACCCA (SEQ ID NO: 793)

[0727] In some embodiments, the vector encoding the shRNA comprises a polyT tail, i.e., 2, 3, 4, 5, 6, or more T nucleotides in sequence, for example: TT, TTT, TTTT, TTTTT, TTTTTT, TTTTTT, TTTTTTT, TTTTTTTTT, TTTTTTTTT etc. Non-limiting exemplary sequences comprising all the vector elements described in this paragraph include:

TABLE 29

| | | | | |
|---|---|---|---|---|
| Promoter | Sense | Loop | Anti-sense | Poly T |
| TATATATCTTGTGGAAAGGACGAAACACCG (SEQ ID NO: 788) | GGGTAAGCCAAGAAAGAAA (SEQ ID NO: 418) | GTTAATATTCATAGC (SEQ ID NO: 792) | TTTCTTTCTTGGCTTACCC (SEQ ID NO: 419) | TTT TTT |
| TATATATCTTGTGGAAAGGACGAAACACCG (SEQ ID NO: 788) | GGGTAAGCCAA GAAAGAAA (SEQ ID NO: 418) | CCTGACC CA (SEQ ID NO: 793) | TTTCTTTCTTGGCTTACCC (SEQ ID NO: 419) | TTT TTT |
| TTATATATCTTGTGGAAAGGACGAAACACCA (SEQ ID NO: 790) | GGGTAAGCCAAGAAAGAAA(SEQ ID NO: 418) | GTTAATATTCATAGC (SEQ ID NO: 792) | TTTCTTTCTTGGCTTACCC (SEQ ID NO: 419) | TTT TTT |
| TTATATATCTTGTGGAAAGGACGAAACACCA (SEQ ID NO: 790) | GGGTAAGCCAA GAAAGAAA (SEQ ID NO: 418) | CCTGACC CA (SEQ ID NO: 793) | TTTCTTTCTTGGCTTACCC (SEQ ID NO: 419) | TTT TTT |
| TTATATATCTTGTGGAAAGGACGAAACACCG (SEQ ID NO: 791) | GGGTAAGCCAA GAAAGAAA (SEQ ID NO: 418) | GTTAATA TTCATAG C (SEQ ID NO: 792) | TTTCTTTCTTGGCTTACCC (SEQ ID NO: 419) | TTT TTT |
| TTATATATCTTGTGGAAAGGACGAAACACCG (SEQ ID NO: 791) | GGGTAAGCCAAGAAAGAAA (SEQ ID NO: 418) | CCTGACCCA (SEQ ID NO: 793) | TTTCTTTCTTGGCTTACCC (SEQ ID NO: 419) | TTT TTT |

[0728] It is appreciated that one of ordinary skill in the art is readily able to transcribe the DNA sequences disclosed herein, as pertaining to a vector encoding an shRNA, into RNA by replacing the “T” with “U” - thus, yielding the shRNA sequence. In some embodiments, the shRNA or the vector encoding the shRNA is used in step (ii) (i.e. the contacting step) of the method of making a population of cells (for example, T cells) that express a chimeric antigen receptor (CAR) disclosed herein above. Accordingly, step (ii) may further comprise contacting the population of cells (for example, T-cells) with shRNA, optionally the vector encoding the shRNA, described herein. In some embodiments, the vector encoding the shRNA further comprises a detectable tag, i.e. a tag that can be detected in cells contacted with the vector to indicate successful transduction. Non-limiting examples of such detectable tags are known, such as but not limited to fluorescent tags and/or artificial surface markers, optionally detectable by commercially available antibodies or other molecules. Further non-limiting examples include artificial surface markers such as truncated EGFR or biotin/streptavidin; such tags are well known in the art. In some embodiments, the vector encoding the shRNA comprises the nucleic acid encoding a CAR, disclosed herein above and used in step (ii) (i.e. the contacting step) of the method of making a population of cells (for example, T cells) that express a chimeric antigen receptor (CAR) disclosed herein above.

### Co-Expression of CAR With a Chemokine Receptor

[0729] In embodiments, the CAR-expressing cell described herein, for example, CD19 CAR-expressing cell, further comprises a chemokine receptor molecule. Transgenic expression of chemokine receptors CCR2b or CXCR2 in T cells enhances trafficking to CCL2- or CXCL1-secreting solid tumors including melanoma and neuroblastoma (Craddock et al., J Immunother. 2010 Oct; 33(8):780-8 and Kershaw et al., Hum Gene Ther. 2002 Nov 1; 13(16):1971-80). Thus, without wishing to be bound by theory, it is believed that chemokine receptors expressed in CAR-expressing cells that recognize chemokines secreted by tumors, for example, solid tumors, can improve homing of the CAR-expressing cell to the tumor, facilitate the infiltration of the CAR-expressing cell to the tumor, and enhances antitumor efficacy of the CAR-expressing cell. The chemokine receptor molecule can comprise a naturally occurring or recombinant chemokine receptor or a chemokine-binding fragment thereof. A chemokine receptor molecule suitable for expression in a CAR-expressing cell (for example, CAR-Tx) described herein include a CXC chemokine receptor (for example, CXCR1, CXCR2, CXCR3, CXCR4, CXCR5, CXCR6, or CXCR7), a CC chemokine receptor (for example, CCR1, CCR2, CCR3, CCR4, CCR5, CCR6, CCR7, CCR8, CCR9, CCR10, or CCR11), a CX3C chemokine receptor (for example, CX3CR1), a XC chemokine receptor (for example, XCR1), or a chemokine-binding fragment thereof. In some embodiments, the chemokine receptor molecule to be expressed with a CAR described herein is selected based on the chemokine(s) secreted by the tumor. In some embodiments, the CAR-expressing cell described herein further comprises, for example, expresses, a CCR2b receptor or a CXCR2 receptor. In some embodiments, the CAR described herein and the chemokine receptor molecule are on the same vector or are on two different vectors. In embodiments where the CAR described herein and the chemokine receptor molecule are on the same vector, the CAR and the chemokine receptor molecule are each under control of two different promoters or are under the control of the same promoter.

### Nucleic Acid Constructs Encoding a CAR

[0730] The present invention also provides an immune effector cell, for example, made by a method described herein, that includes a nucleic acid molecule encoding one or more CAR constructs described herein. In some embodiments, the nucleic acid molecule is provided as a messenger RNA transcript. In some embodiments, the nucleic acid molecule is provided as a DNA construct.

[0731] The nucleic acid molecules described herein can be a DNA molecule, an RNA molecule, or a combination thereof. In some embodiments, the nucleic acid molecule is an mRNA encoding a CAR polypeptide as described herein. In other embodiments, the nucleic acid molecule is a vector that includes any of the aforesaid nucleic acid molecules.

[0732] In some embodiments, the antigen binding domain of a CAR of the invention (for example, a scFv) is encoded by a nucleic acid molecule whose sequence has been codon optimized for expression in a mammalian cell. In some embodiments, entire CAR construct of the invention is encoded by a nucleic acid molecule whose entire sequence has been codon optimized for expression in a mammalian cell. Codon optimization refers to the discovery that the frequency of occurrence of synonymous codons (i.e., codons that code for the same amino acid) in coding DNA is biased in different species. Such codon degeneracy allows an identical polypeptide to be encoded by a variety of nucleotide sequences. A variety of codon optimization methods is known in the art, and include, for example, methods disclosed in at least U.S. Pat. Nos. 5,786,464 and 6,114,148.

[0733] Accordingly, in some embodiments, an immune effector cell, for example, made by a method described herein, includes a nucleic acid molecule encoding a chimeric antigen receptor (CAR), wherein the CAR comprises an antigen binding domain that binds to a tumor antigen described herein, a transmembrane domain (for example, a transmembrane domain described herein), and an intracellular signaling domain (for example, an intracellular signaling domain described herein) comprising a stimulatory domain, for example, a costimulatory signaling domain (for example, a costimulatory signaling domain described herein) and/or a primary signaling domain (for example, a primary signaling domain described herein, for example, a zeta chain described herein).

[0734] The present invention also provides vectors in which a nucleic acid molecule encoding a CAR, for example, a nucleic acid molecule described herein, is inserted. Vectors derived from retroviruses such as the lentivirus are suitable tools to achieve long-term gene transfer since they allow long-term, stable integration of a transgene and its propagation in daughter cells. Lentiviral vectors have the added advantage over vectors derived from onco-retroviruses such as murine leukemia viruses in that they can transduce non-proliferating cells, such as hepatocytes. They also have the added advantage of low immunogenicity. A retroviral vector may also be, for example, a gammaretroviral vector. A gammaretroviral vector may include, for example, a promoter, a packaging signal (ψ), a primer binding site (PBS), one or more (for example, two) long terminal repeats (LTR), and a transgene of interest, for example, a gene encoding a CAR. A gammaretroviral vector may lack viral structural gens such as gag, pol, and env. Exemplary gammaretroviral vectors include Murine Leukemia Virus (MLV), Spleen-Focus Forming Virus (SFFV), and Myeloproliferative Sarcoma Virus (MPSV), and vectors derived therefrom. Other gammaretroviral vectors are described, for example, in Tobias Maetzig et al., “Gammaretroviral Vectors: Biology, Technology and Application” Viruses. 2011 Jun; 3(6): 677-713.

[0735] In some embodiments, the vector comprising the nucleic acid encoding the desired CAR is an adenoviral vector (A5/35). In some embodiments, the expression of nucleic acids encoding CARs can be accomplished using of transposons such as sleeping beauty, crisper, CAS9, and zinc finger nucleases. See below June et al. 2009Nature Reviews Immunology 9.10: 704-716, is incorporated herein by reference.

[0736] In brief summary, the expression of natural or synthetic nucleic acids encoding CARs is typically achieved by operably linking a nucleic acid encoding the CAR polypeptide or portions thereof to a promoter, and incorporating the construct into an expression vector. The vectors can be suitable for replication and integration eukaryotes. Typical cloning vectors contain transcription and translation terminators, initiation sequences, and promoters useful for regulation of the expression of the desired nucleic acid sequence.

[0737] The nucleic acid can be cloned into a number of types of vectors. For example, the nucleic acid can be cloned into a vector including, but not limited to a plasmid, a phagemid, a phage derivative, an animal virus, and a cosmid. Vectors of particular interest include expression vectors, replication vectors, probe generation vectors, and sequencing vectors.

[0738] Further, the expression vector may be provided to a cell in the form of a viral vector. Viral vector technology is well known in the art and is described, for example, in Sambrook et al., 2012, MOLECULAR CLONING: A LABORATORY MANUAL, volumes 1-4, Cold Spring Harbor Press, NY), and in other virology and molecular biology manuals. Viruses, which are useful as vectors include, but are not limited to, retroviruses, adenoviruses, adeno-associated viruses, herpes viruses, and lentiviruses. In general, a suitable vector contains an origin of replication functional in at least one organism, a promoter sequence, convenient restriction endonuclease sites, and one or more selectable markers, (for example, WO 01/96584; WO 01/29058; and U.S. Pat. No. 6,326,193).

[0739] A number of viral based systems have been developed for gene transfer into mammalian cells. For example, retroviruses provide a convenient platform for gene delivery systems. A selected gene can be inserted into a vector and packaged in retroviral particles using techniques known in the art. The recombinant virus can then be isolated and delivered to cells of the subject either in vivo or ex vivo. A number of retroviral systems are known in the art. In some embodiments, adenovirus vectors are used. A number of adenovirus vectors are known in the art. In some embodiments, lentivirus vectors are used.

[0740] Additional promoter elements, for example, enhancers, regulate the frequency of transcriptional initiation. Typically, these are located in the region 30-110 bp upstream of the start site, although a number of promoters have been shown to contain functional elements downstream of the start site as well. The spacing between promoter elements frequently is flexible, so that promoter function is preserved when elements are inverted or moved relative to one another. In the thymidine kinase (tk) promoter, the spacing between promoter elements can be increased to 50 bp apart before activity begins to decline. Depending on the promoter, it appears that individual elements can function either cooperatively or independently to activate transcription. Exemplary promoters include the CMV IE gene, EF-1α, ubiquitin C, or phosphoglycerokinase (PGK) promoters.

[0741] An example of a promoter that is capable of expressing a CAR encoding nucleic acid molecule in a mammalian T cell is the EFla promoter. The native EFla promoter drives expression of the alpha subunit of the elongation factor-1 complex, which is responsible for the enzymatic delivery of aminoacyl tRNAs to the ribosome. The EFla promoter has been extensively used in mammalian expression plasmids and has been shown to be effective in driving CAR expression from nucleic acid molecules cloned into a lentiviral vector. See, for example, Milone et al., Mol. Ther. 17(8): 1453-1464 (2009). In some embodiments, the EFla promoter comprises the sequence provided in the Examples.

[0742] Another example of a promoter is the immediate early cytomegalovirus (CMV) promoter sequence. This promoter sequence is a strong constitutive promoter sequence capable of driving high levels of expression of any polynucleotide sequence operatively linked thereto. However, other constitutive promoter sequences may also be used, including, but not limited to the simian virus 40 (SV40) early promoter, mouse mammary tumor virus (MMTV), human immunodeficiency virus (HIV) long terminal repeat (LTR) promoter, MoMuLV promoter, an avian leukemia virus promoter, an Epstein-Barr virus immediate early promoter, a Rous sarcoma virus promoter, as well as human gene promoters such as, but not limited to, the actin promoter, the myosin promoter, the elongation factor-1α promoter, the hemoglobin promoter, and the creatine kinase promoter. Further, the invention should not be limited to the use of constitutive promoters. Inducible promoters are also contemplated as part of the invention. The use of an inducible promoter provides a molecular switch capable of turning on expression of the polynucleotide sequence which it is operatively linked when such expression is desired, or turning off the expression when expression is not desired. Examples of inducible promoters include, but are not limited to a metallothionine promoter, a glucocorticoid promoter, a progesterone promoter, and a tetracycline promoter.

[0743] Another example of a promoter is the phosphoglycerate kinase (PGK) promoter. In embodiments, a truncated PGK promoter (for example, a PGK promoter with one or more, for example, 1, 2, 5, 10, 100, 200, 300, or 400, nucleotide deletions when compared to the wild-type PGK promoter sequence) may be desired.

[0744] The nucleotide sequences of exemplary PGK promoters are provided below.

[0745] WT PGK Promoter:

ACCCCTCTCTCCAGCCACTAAGCCAGTTGCTCCCTCGGCTGACGGCTGCA
CGCGAGGCCTCCGAACGTCTTACGCCTTGTGGCGCGCCCGTCCTTGTCCC
GGGTGTGATGGCGGGGTGTGGGGCGGAGGGCGTGGCGGGGAAGGGCCGGC
GACGAGAGCCGCGCGGGACGACTCGTCGGCGATAACCGGTGTCGGGTAGC
GCCAGCCGCGCGACGGTAACGAGGGACCGCGACAGGCAGACGCTCCCATG
ATCACTCTGCACGCCGAAGGCAAATAGTGCAGGCCGTGCGGCGCTTGGCG
TTCCTTGGAAGGGCTGAATCCCCGCCTCGTCCTTCGCAGCGGCCCCCCGG
GTGTTCCCATCGCCGCTTCTAGGCCCACTGCGACGCTTGCCTGCACTTCT
TACACGCTCTGGGTCCCAGCCGCGGCGACGCAAAGGGCCTTGGTGCGGGT
CTCGTCGGCGCAGGGACGCGTTTGGGTCCCGACGGAACCTTTTCCGCGTT
GGGGTTGGGGCACCATAAGCT (SEQ ID NO: 190)

[0746] Exemplary truncated PGK Promoters: PGK100:

ACCCCTCTCTCCAGCCACTAAGCCAGTTGCTCCCTCGGCTGACGGCTGCA
CGCGAGGCCTCCGAACGTCTTACGCCTTGTGGCGCGCCCGTCCTTGTCCC
GGGTGTGATGGCGGGGTG (SEQ ID NO: 198)

[0747] PGK200:

ACCCCTCTCTCCAGCCACTAAGCCAGTTGCTCCCTCGGCTGACGGCTGCA
CGCGAGGCCTCCGAACGTCTTACGCCTTGTGGCGCGCCCGTCCTTGTCCC
GGGTGTGATGGCGGGGTGTGGGGCGGAGGGCGTGGCGGGGAAGGGCCGGC
GACGAGAGCCGCGCGGGACGACTCGTCGGCGATAACCGGTGTCGGGTAGC
GCCAGCCGCGCGACGGTAACG (SEQ ID NO: 191)

[0748] PGK300:

ACCCCTCTCTCCAGCCACTAAGCCAGTTGCTCCCTCGGCTGACGGCTGCA
CGCGAGGCCTCCGAACGTCTTACGCCTTGTGGCGCGCCCGTCCTTGTCCC
GGGTGTGATGGCGGGGTGTGGGGCGGAGGGCGTGGCGGGGAAGGGCCGGC
GACGAGAGCCGCGCGGGACGACTCGTCGGCGATAACCGGTGTCGGGTAGC
GCCAGCCGCGCGACGGTAACGAGGGACCGCGACAGGCAGACGCTCCCATG
ATCACTCTGCACGCCGAAGGCAAATAGTGCAGGCCGTGCGGCGCTTGGCG
TTCCTTGGAAGGGCTGAATCCCCG (SEQ ID NO: 192)

[0749] PGK400:

ACCCCTCTCTCCAGCCACTAAGCCAGTTGCTCCCTCGGCTGACGGCTGCA
CGCGAGGCCTCCGAACGTCTTACGCCTTGTGGCGCGCCCGTCCTTGTCCC
GGGTGTGATGGCGGGGTGTGGGGCGGAGGGCGTGGCGGGGAAGGGCCGGC
GACGAGAGCCGCGCGGGACGACTCGTCGGCGATAACCGGTGTCGGGTAGC
GCCAGCCGCGCGACGGTAACGAGGGACCGCGACAGGCAGACGCTCCCATG
ATCACTCTGCACGCCGAAGGCAAATAGTGCAGGCCGTGCGGCGCTTGGCG
TTCCTTGGAAGGGCTGAATCCCCGCCTCGTCCTTCGCAGCGGCCCCCCGG
GTGTTCCCATCGCCGCTTCTAGGCCCACTGCGACGCTTGCCTGCACTTCT
TACACGCTCTGGGTCCCAGCCG (SEQ ID NO: 193)

[0750] A vector may also include, for example, a signal sequence to facilitate secretion, a polyadenylation signal and transcription terminator (for example, from Bovine Growth Hormone (BGH) gene), an element allowing episomal replication and replication in prokaryotes (for example SV40 origin and ColE1 or others known in the art) and/or elements to allow selection (for example, ampicillin resistance gene and/or zeocin marker).

[0751] In order to assess the expression of a CAR polypeptide or portions thereof, the expression vector to be introduced into a cell can also contain either a selectable marker gene or a reporter gene or both to facilitate identification and selection of expressing cells from the population of cells sought to be transfected or infected through viral vectors. In some embodiments, the selectable marker may be carried on a separate piece of DNA and used in a co- transfection procedure. Both selectable markers and reporter genes may be flanked with appropriate regulatory sequences to enable expression in the host cells. Useful selectable markers include, for example, antibiotic-resistance genes, such as neo and the like.

[0752] Reporter genes are used for identifying potentially transfected cells and for evaluating the functionality of regulatory sequences. In general, a reporter gene is a gene that is not present in or expressed by the recipient organism or tissue and that encodes a polypeptide whose expression is manifested by some easily detectable property, for example, enzymatic activity. Expression of the reporter gene is assayed at a suitable time after the DNA has been introduced into the recipient cells. Suitable reporter genes may include genes encoding luciferase, beta-galactosidase, chloramphenicol acetyl transferase, secreted alkaline phosphatase, or the green fluorescent protein gene (for example, Ui-Tei et al., 2000 FEBS Letters 479: 79-82). Suitable expression systems are well known and may be prepared using known techniques or obtained commercially. In general, the construct with the minimal 5′ flanking region showing the highest level of expression of reporter gene is identified as the promoter. Such promoter regions may be linked to a reporter gene and used to evaluate agents for the ability to modulate promoter- driven transcription.

[0753] In embodiments, the vector may comprise two or more nucleic acid sequences encoding a CAR, for example, a CAR described herein, for example, a CD 19 CAR, and a second CAR, for example, an inhibitory CAR or a CAR that specifically binds to an antigen other than CD19. In such embodiments, the two or more nucleic acid sequences encoding the CAR are encoded by a single nucleic molecule in the same frame and as a single polypeptide chain. In some embodiments, the two or more CARs, can, for example, be separated by one or more peptide cleavage sites. (for example, an auto-cleavage site or a substrate for an intracellular protease). Examples of peptide cleavage sites include T2A, P2A, E2A, or F2A sites.

[0754] Methods of introducing and expressing genes into a cell are known in the art. In the context of an expression vector, the vector can be readily introduced into a host cell, for example, mammalian, bacterial, yeast, or insect cell by any method, for example, one known in the art. For example, the expression vector can be transferred into a host cell by physical, chemical, or biological means.

[0755] Physical methods for introducing a polynucleotide into a host cell include calcium phosphate precipitation, lipofection, particle bombardment, microinjection, electroporation, and the like. Methods for producing cells comprising vectors and/or exogenous nucleic acids are well-known in the art. See, for example, Sambrook et al., 2012, MOLECULAR CLONING: A LABORATORY MANUAL, volumes 1 -4, Cold Spring Harbor Press, NY). A suitable method for the introduction of a polynucleotide into a host cell is calcium phosphate transfection.

[0756] Biological methods for introducing a polynucleotide of interest into a host cell include the use of DNA and RNA vectors. Viral vectors, and especially retroviral vectors, have become the most widely used method for inserting genes into mammalian, for example, human cells. Other viral vectors can be derived from lentivirus, poxviruses, herpes simplex virus I, adenoviruses and adeno-associated viruses, and the like. See, for example, U.S. Pat. Nos. 5,350,674 and 5,585,362.

[0757] Chemical means for introducing a polynucleotide into a host cell include colloidal dispersion systems, such as macromolecule complexes, nanocapsules, microspheres, beads, and lipid-based systems including oil-in-water emulsions, micelles, mixed micelles, and liposomes. An exemplary colloidal system for use as a delivery vehicle in vitro and in vivo is a liposome (for example, an artificial membrane vesicle). Other methods of state-of-the-art targeted delivery of nucleic acids are available, such as delivery of polynucleotides with targeted nanoparticles or other suitable sub-micron sized delivery system.

[0758] In the case where a non-viral delivery system is utilized, an exemplary delivery vehicle is a liposome. The use of lipid formulations is contemplated for the introduction of the nucleic acids into a host cell (in vitro, ex vivo or in vivo). In some embodiments, the nucleic acid may be associated with a lipid. The nucleic acid associated with a lipid may be encapsulated in the aqueous interior of a liposome, interspersed within the lipid bilayer of a liposome, attached to a liposome via a linking molecule that is associated with both the liposome and the oligonucleotide, entrapped in a liposome, complexed with a liposome, dispersed in a solution containing a lipid, mixed with a lipid, combined with a lipid, contained as a suspension in a lipid, contained or complexed with a micelle, or otherwise associated with a lipid. Lipid, lipid/DNA or lipid/expression vector associated compositions are not limited to any particular structure in solution. For example, they may be present in a bilayer structure, as micelles, or with a “collapsed” structure. They may also simply be interspersed in a solution, possibly forming aggregates that are not uniform in size or shape. Lipids are fatty substances which may be naturally occurring or synthetic lipids. For example, lipids include the fatty droplets that naturally occur in the cytoplasm as well as the class of compounds which contain long-chain aliphatic hydrocarbons and their derivatives, such as fatty acids, alcohols, amines, amino alcohols, and aldehydes.

[0759] Lipids suitable for use can be obtained from commercial sources. For example, dimyristyl phosphatidylcholine (“DMPC”) can be obtained from Sigma, St. Louis, MO; dicetyl phosphate (“DCP”) can be obtained from K & K Laboratories (Plainview, NY); cholesterol (“Choi”) can be obtained from Calbiochem-Behring; dimyristyl phosphatidylglycerol (“DMPG”) and other lipids may be obtained from Avanti Polar Lipids, Inc. (Birmingham, AL.). Stock solutions of lipids in chloroform or chloroform/methanol can be stored at about -20° C. Chloroform is used as the only solvent since it is more readily evaporated than methanol. “Liposome” is a generic term encompassing a variety of single and multilamellar lipid vehicles formed by the generation of enclosed lipid bilayers or aggregates. Liposomes can be characterized as having vesicular structures with a phospholipid bilayer membrane and an inner aqueous medium. Multilamellar liposomes have multiple lipid layers separated by aqueous medium. They form spontaneously when phospholipids are suspended in an excess of aqueous solution. The lipid components undergo self-rearrangement before the formation of closed structures and entrap water and dissolved solutes between the lipid bilayers (Ghosh et al., 1991 Glycobiology 5: 505-10). However, compositions that have different structures in solution than the normal vesicular structure are also encompassed. For example, the lipids may assume a micellar structure or merely exist as nonuniform aggregates of lipid molecules. Also contemplated are lipofectamine-nucleic acid complexes.

[0760] Regardless of the method used to introduce exogenous nucleic acids into a host cell or otherwise expose a cell to the inhibitor of the present invention, in order to confirm the presence of the recombinant nucleic acid sequence in the host cell, a variety of assays may be performed. Such assays include, for example, “molecular biological” assays well known to those of skill in the art, such as Southern and Northern blotting, RT-PCR and PCR; “biochemical” assays, such as detecting the presence or absence of a particular peptide, for example, by immunological means (ELISAs and Western blots) or by assays described herein to identify agents falling within the scope of the invention.

### Natural Killer Cell Receptor (NKR) CARs

[0761] In some embodiments, the CAR molecule described herein comprises one or more components of a natural killer cell receptor (NKR), thereby forming an NKR-CAR. The NKR component can be a transmembrane domain, a hinge domain, or a cytoplasmic domain from any of the following natural killer cell receptors: killer cell immunoglobulin-like receptor (KIR), for example, KIR2DL1, KIR2DL2/L3, KIR2DL4, KIR2DL5A, KIR2DL5B, KIR2DS1, KIR2DS2, KIR2DS3, KIR2DS4, DIR2DS5, KIR3DL1/S1, KIR3DL2, KIR3DL3, KIR2DP1, and KIR3DP1; natural cytotoxicity receptor (NCR), for example, NKp30, NKp44, NKp46; signaling lymphocyte activation molecule (SLAM) family of immune cell receptors, for example, CD48, CD229, 2B4, CD84, NTB-A, CRACC, BLAME, and CD2F-10; Fc receptor (FcR), for example, CD16, and CD64; and Ly49 receptors, for example, LY49A, LY49C. The NKR-CAR molecules described herein may interact with an adaptor molecule or intracellular signaling domain, for example, DAP12. Exemplary configurations and sequences of CAR molecules comprising NKR components are described in International Publication No. WO2014/145252, the contents of which are hereby incorporated by reference.

### Split CAR

[0762] In some embodiments, the CAR-expressing cell uses a split CAR. The split CAR approach is described in more detail in publications WO2014/055442 and WO2014/055657. Briefly, a split CAR system comprises a cell expressing a first CAR having a first antigen binding domain and a costimulatory domain (for example, 41BB), and the cell also expresses a second CAR having a second antigen binding domain and an intracellular signaling domain (for example, CD3 zeta). When the cell encounters the first antigen, the costimulatory domain is activated, and the cell proliferates. When the cell encounters the second antigen, the intracellular signaling domain is activated and cell-killing activity begins. Thus, the CAR-expressing cell is only fully activated in the presence of both antigens.

### Strategies for Regulating Chimeric Antigen Receptors

[0763] In some embodiments, a regulatable CAR (RCAR) where the CAR activity can be controlled is desirable to optimize the safety and efficacy of a CAR therapy. There are many ways CAR activities can be regulated. For example, inducible apoptosis using, for example, a caspase fused to a dimerization domain (see, for example, Di Stasa et al., N Engl. J. Med. 2011 Nov. 3; 365(18):1673-1683), can be used as a safety switch in the CAR therapy of the instant invention. In some embodiments, the cells (for example, T cells or NK cells) expressing a CAR of the present invention further comprise an inducible apoptosis switch, wherein a human caspase (for example, caspase 9) or a modified version is fused to a modification of the human FKB protein that allows conditional dimerization. In the presence of a small molecule, such as a rapalog (for example, AP 1903, AP20187), the inducible caspase (for example, caspase 9) is activated and leads to the rapid apoptosis and death of the cells (for example, T cells or NK cells) expressing a CAR of the present invention. Examples of a caspase-based inducible apoptosis switch (or one or more aspects of such a switch) have been described in, for example, US2004040047; US20110286980; US20140255360; WO1997031899; WO2014151960; WO2014164348; WO2014197638; WO2014197638; all of which are incorporated by reference herein.

[0764] In another example, CAR-expressing cells can also express an inducible Caspase-9 (iCaspase-9) molecule that, upon administration of a dimerizer drug (for example, rimiducid (also called AP1903 (Bellicum Pharmaceuticals) or AP20187 (Ariad)) leads to activation of the Caspase-9 and apoptosis of the cells. The iCaspase-9 molecule contains a chemical inducer of dimerization (CID) binding domain that mediates dimerization in the presence of a CID. This results in inducible and selective depletion of CAR-expressing cells. In some cases, the iCaspase-9 molecule is encoded by a nucleic acid molecule separate from the CAR-encoding vector(s). In some cases, the iCaspase-9 molecule is encoded by the same nucleic acid molecule as the CAR-encoding vector. The iCaspase-9 can provide a safety switch to avoid any toxicity of CAR-expressing cells. See, for example, Song et al. Cancer Gene Ther. 2008; 15(10):667-75; Clinical Trial Id. No. NCT02107963; and Di Stasi et al. N. Engl. J. Med. 2011; 365:1673-83.

[0765] Alternative strategies for regulating the CAR therapy of the instant invention include utilizing small molecules or antibodies that deactivate or turn off CAR activity, for example, by deleting CAR-expressing cells, for example, by inducing antibody dependent cell-mediated cytotoxicity (ADCC). For example, CAR-expressing cells described herein may also express an antigen that is recognized by molecules capable of inducing cell death, for example, ADCC or complement-induced cell death. For example, CAR expressing cells described herein may also express a receptor capable of being targeted by an antibody or antibody fragment. Examples of such receptors include EpCAM, VEGFR, integrins (for example, integrins αvβ3, α4, αI¾β3, α4β7, α5β1, αvβ3, αv), members of the TNF receptor superfamily (for example, TRAIL-R1, TRAIL-R2), PDGF Receptor, interferon receptor, folate receptor, GPNMB, ICAM-1, HLA-DR, CEA, CA-125, MUC1, TAG-72, IL-6 receptor, 5T4, GD2, GD3, CD2, CD3, CD4, CD5, CD11, CD11a/LFA-1, CD15, CD18/ITGB2, CD19, CD20, CD22, CD23/lgE Receptor, CD25, CD28, CD30, CD33, CD38, CD40, CD41, CD44, CD51, CD52, CD62L, CD74, CD80, CD125, CD147/basigin, CD152/CTLA-4, CD154/CD40L, CD195/CCR5, CD319/SLAMF7, and EGFR, and truncated versions thereof (for example, versions preserving one or more extracellular epitopes but lacking one or more regions within the cytoplasmic domain).

[0766] For example, a CAR-expressing cell described herein may also express a truncated epidermal growth factor receptor (EGFR) which lacks signaling capacity but retains the epitope that is recognized by molecules capable of inducing ADCC, for example, cetuximab (ERBITUX®), such that administration of cetuximab induces ADCC and subsequent depletion of the CAR-expressing cells (see, for example, WO2011/056894, and Jonnalagadda et al., Gene Ther. 2013; 20(8)853-860). Another strategy includes expressing a highly compact marker/suicide gene that combines target epitopes from both CD32 and CD20 antigens in the CAR-expressing cells described herein, which binds rituximab, resulting in selective depletion of the CAR-expressing cells, for example, by ADCC (see, for example, Philip et al., Blood. 2014; 124(8)1277-1287). Other methods for depleting CAR-expressing cells described herein include administration of CAMPATH, a monoclonal anti-CD52 antibody that selectively binds and targets mature lymphocytes, for example, CAR-expressing cells, for destruction, for example, by inducing ADCC. In other embodiments, the CAR-expressing cell can be selectively targeted using a CAR ligand, for example, an anti-idiotypic antibody. In some embodiments, the anti-idiotypic antibody can cause effector cell activity, for example, ADCC or ADC activities, thereby reducing the number of CAR-expressing cells. In other embodiments, the CAR ligand, for example, the anti-idiotypic antibody, can be coupled to an agent that induces cell killing, for example, a toxin, thereby reducing the number of CAR-expressing cells. Alternatively, the CAR molecules themselves can be configured such that the activity can be regulated, for example, turned on and off, as described below.

[0767] In other embodiments, a CAR-expressing cell described herein may also express a target protein recognized by the T cell depleting agent. In some embodiments, the target protein is CD20 and the T cell depleting agent is an anti-CD20 antibody, for example, rituximab. In some embodiments, the T cell depleting agent is administered once it is desirable to reduce or eliminate the CAR-expressing cell, for example, to mitigate the CAR induced toxicity. In other embodiments, the T cell depleting agent is an anti-CD52 antibody, for example, alemtuzumab, as described in the Examples herein.

[0768] In other embodiments, an RCAR comprises a set of polypeptides, typically two in the simplest embodiments, in which the components of a standard CAR described herein, for example, an antigen binding domain and an intracellular signaling domain, are partitioned on separate polypeptides or members. In some embodiments, the set of polypeptides include a dimerization switch that, upon the presence of a dimerization molecule, can couple the polypeptides to one another, for example, can couple an antigen binding domain to an intracellular signaling domain. In some embodiments, a CAR of the present invention utilizes a dimerization switch as those described in, for example, WO2014127261, which is incorporated by reference herein. Additional description and exemplary configurations of such regulatable CARs are provided herein and in, for example, paragraphs 527-551 of International Publication No. WO 2015/090229 filed Mar. 13, 2015, which is incorporated by reference in its entirety. In some embodiments, an RCAR involves a switch domain, for example, a FKBP switch domain, as set out SEQ ID NO: 275, or comprise a fragment of FKBP having the ability to bind with FRB, for example, as set out in SEQ ID NO: 276. In some embodiments, the RCAR involves a switch domain comprising a FRB sequence, for example, as set out in SEQ ID NO: 277, or a mutant FRB sequence, for example, as set out in any of SEQ ID NOs. 278-283.

DVPDYASLGGPSSPKKKRKVSRGVQVETISPGDGRTFPKRGQTCVVHYTG
MLEDGKKFDSSRDRNKPFKFMLGKQEVIRGWEEGVAQMSVGQRAKLTISP
DYAYGATGHPGIIPPHATLVFDVELLKLETSY (SEQ ID NO: 275)

VQVETISPGDGRTFPKRGQTCVVHYTGMLEDGKKFDSSRDRNKPFKFMLG
KQEVIRGWEEGVAQMSVGQRAKLTISPDYAYGATGHPGIIPPHATLVFDV
ELLKLETS (SEQ ID NO: 276)

ILWHEMWHEGLEEASRLYFGERNVKGMFEVLEPLHAMMERGPQTLKETSF
NQAYGRDLMEAQEWCRKYMKSGNVKDLTQAWDLYYHVFRRISK (SEQ I
D NO: 277)

TABLE 18

Exemplary mutant FRB having increased affinity for a dimerization molecule

| FRB mutant | Amino Acid Sequence | SEQ ID NO: |
|---|---|---|
| E2032I mutant | ILWHEMWHEGLIEASRLYFGERNVKGMFEVLEPLHAMMERGPQTLKETSFNQAYGRDLMEAQEWCRKYMKSGNVKDLTQAWDLYYHVFRRISKTS | 278 |
| E2032L mutant | ILWHEMWHEGLLEASRLYFGERNVKGMFEVLEPLHAMMERGPQTLKETSFNQAYGRDLMEAQEWCRKYMKSGNVKDLTQAWDLYYHVFRRISKTS | 279 |
| T2098L mutant | ILWHEMWHEGLEEASRLYFGERNVKGMFEVLEPLHAMMERGPQTLKETSFNQAYGRDLMEAQEWCRKYMKSGNVKDLLQAWDLYYHVFRRISKTS | 280 |
| E2032, T2098 mutant | ILWHEMWHEGLX EASRLYFGERNVKGMFEVLEPLHAMMERGPQTLKETSFNQAYGRDLMEAQEWCRKYMKSGNVKDLX QAWDLYYHVFRRISKTS | 281 |
| E2032I, T2098L mutant | ILWHEMWHEGLIEASRLYFGERNVKGMFEVLEPLHAMMERGPQTLKETSFNQAYGRDLMEAQEWCRKYMKSGNVKDLLQAWDLYYHVFRRISKTS | 282 |
| E2032L, T2098L mutant | ILWHEMWHEGLLEASRLYFGERNVKGMFEVLEPLHAMMERGPQTLKETSFNQAYGRDLMEAQEWCRKYMKSGNVKDLLQAWDLYYHVFRRISKTS | 283 |

### RNA Transfection

[0769] Disclosed herein are methods for producing an in vitro transcribed RNA CAR. RNA CAR and methods of using the same are described, for example, in paragraphs 553-570 of in International Application WO2015/142675, filed Mar. 13, 2015, which is herein incorporated by reference in its entirety.

[0770] An immune effector cell can include a CAR encoded by a messenger RNA (mRNA). In some embodiments, the mRNA encoding a CAR described herein is introduced into an immune effector cell, for example, made by a method described herein, for production of a CAR-expressing cell.

[0771] In some embodiments, the in vitro transcribed RNA CAR can be introduced to a cell as a form of transient transfection. The RNA is produced by in vitro transcription using a polymerase chain reaction (PCR)-generated template. DNA of interest from any source can be directly converted by PCR into a template for in vitro mRNA synthesis using appropriate primers and RNA polymerase. The source of the DNA can be, for example, genomic DNA, plasmid DNA, phage DNA, cDNA, synthetic DNA sequence or any other appropriate source of DNA. The desired temple for in vitro transcription is a CAR described herein. For example, the template for the RNA CAR comprises an extracellular region comprising a single chain variable domain of an antibody to a tumor associated antigen described herein; a hinge region (for example, a hinge region described herein), a transmembrane domain (for example, a transmembrane domain described herein such as a transmembrane domain of CD8a); and a cytoplasmic region that includes an intracellular signaling domain, for example, an intracellular signaling domain described herein, for example, comprising the signaling domain of CD3-zeta and the signaling domain of 4-1BB.

[0772] In some embodiments, the DNA to be used for PCR contains an open reading frame. The DNA can be from a naturally occurring DNA sequence from the genome of an organism. In some embodiments, the nucleic acid can include some or all of the 5′ and/or 3′ untranslated regions (UTRs). The nucleic acid can include exons and introns. In some embodiments, the DNA to be used for PCR is a human nucleic acid sequence. In some embodiments, the DNA to be used for PCR is a human nucleic acid sequence including the 5′ and 3′ UTRs. The DNA can alternatively be an artificial DNA sequence that is not normally expressed in a naturally occurring organism. An exemplary artificial DNA sequence is one that contains portions of genes that are ligated together to form an open reading frame that encodes a fusion protein. The portions of DNA that are ligated together can be from a single organism or from more than one organism.

[0773] PCR is used to generate a template for in vitro transcription of mRNA which is used for transfection. Methods for performing PCR are well known in the art. Primers for use in PCR are designed to have regions that are substantially complementary to regions of the DNA to be used as a template for the PCR. “Substantially complementary,” as used herein, refers to sequences of nucleotides where a majority or all of the bases in the primer sequence are complementary, or one or more bases are non-complementary, or mismatched. Substantially complementary sequences are able to anneal or hybridize with the intended DNA target under annealing conditions used for PCR. The primers can be designed to be substantially complementary to any portion of the DNA template. For example, the primers can be designed to amplify the portion of a nucleic acid that is normally transcribed in cells (the open reading frame), including 5′ and 3′ UTRs. The primers can also be designed to amplify a portion of a nucleic acid that encodes a particular domain of interest. In some embodiments, the primers are designed to amplify the coding region of a human cDNA, including all or portions of the 5′ and 3′ UTRs. Primers useful for PCR can be generated by synthetic methods that are well known in the art. “Forward primers” are primers that contain a region of nucleotides that are substantially complementary to nucleotides on the DNA template that are upstream of the DNA sequence that is to be amplified. “Upstream” is used herein to refer to a location 5, to the DNA sequence to be amplified relative to the coding strand. “Reverse primers” are primers that contain a region of nucleotides that are substantially complementary to a double-stranded DNA template that are downstream of the DNA sequence that is to be amplified. “Downstream” is used herein to refer to a location 3′ to the DNA sequence to be amplified relative to the coding strand.

[0774] Any DNA polymerase useful for PCR can be used in the methods disclosed herein. The reagents and polymerase are commercially available from a number of sources.

[0775] Chemical structures with the ability to promote stability and/or translation efficiency may also be used. The RNA in embodiments has 5′ and 3′ UTRs. In some embodiments, the 5′ UTR is between one and 3000 nucleotides in length. The length of 5′ and 3′ UTR sequences to be added to the coding region can be altered by different methods, including, but not limited to, designing primers for PCR that anneal to different regions of the UTRs. Using this approach, one of ordinary skill in the art can modify the 5′ and 3′ UTR lengths required to achieve optimal translation efficiency following transfection of the transcribed RNA.

[0776] The 5′ and 3′ UTRs can be the naturally occurring, endogenous 5′ and 3′ UTRs for the nucleic acid of interest. Alternatively, UTR sequences that are not endogenous to the nucleic acid of interest can be added by incorporating the UTR sequences into the forward and reverse primers or by any other modifications of the template. The use of UTR sequences that are not endogenous to the nucleic acid of interest can be useful for modifying the stability and/or translation efficiency of the RNA. For example, it is known that AU-rich elements in 3′ UTR sequences can decrease the stability of mRNA. Therefore, 3′ UTRs can be selected or designed to increase the stability of the transcribed RNA based on properties of UTRs that are well known in the art.

[0777] In some embodiments, the 5′ UTR can contain the Kozak sequence of the endogenous nucleic acid. Alternatively, when a 5′ UTR that is not endogenous to the nucleic acid of interest is being added by PCR as described above, a consensus Kozak sequence can be redesigned by adding the 5′ UTR sequence. Kozak sequences can increase the efficiency of translation of some RNA transcripts, but does not appear to be required for all RNAs to enable efficient translation. The requirement for Kozak sequences for many mRNAs is known in the art. In other embodiments the 5′ UTR can be 5′UTR of an RNA virus whose RNA genome is stable in cells. In other embodiments various nucleotide analogues can be used in the 3′ or 5′ UTR to impede exonuclease degradation of the mRNA.

[0778] To enable synthesis of RNA from a DNA template without the need for gene cloning, a promoter of transcription should be attached to the DNA template upstream of the sequence to be transcribed. When a sequence that functions as a promoter for an RNA polymerase is added to the 5′ end of the forward primer, the RNA polymerase promoter becomes incorporated into the PCR product upstream of the open reading frame that is to be transcribed. In some embodiments, the promoter is a T7 polymerase promoter, as described elsewhere herein. Other useful promoters include, but are not limited to, T3 and SP6 RNA polymerase promoters. Consensus nucleotide sequences for T7, T3 and SP6 promoters are known in the art.

[0779] In some embodiments, the mRNA has both a cap on the 5′ end and a 3′ poly(A) tail which determine ribosome binding, initiation of translation and stability mRNA in the cell. On a circular DNA template, for instance, plasmid DNA, RNA polymerase produces a long concatameric product which is not suitable for expression in eukaryotic cells. The transcription of plasmid DNA linearized at the end of the 3′ UTR results in normal sized mRNA which is not effective in eukaryotic transfection even if it is polyadenylated after transcription.

[0780] On a linear DNA template, phage T7 RNA polymerase can extend the 3′ end of the transcript beyond the last base of the template (Schenbom and Mierendorf, Nuc Acids Res., 13:6223-36 (1985); Nacheva and Berzal-Herranz, Eur. J. Biochem., 270:1485-65 (2003).

[0781] The conventional method of integration of poly(A)/T stretches into a DNA template is molecular cloning. However, poly(A)/T sequence integrated into plasmid DNA can cause plasmid instability, which is why plasmid DNA templates obtained from bacterial cells are often highly contaminated with deletions and other aberrations. This makes cloning procedures not only laborious and time consuming but often not reliable. That is why a method which allows construction of DNA templates with poly(A)/T 3′ stretch without cloning highly desirable.

[0782] The poly(A)/T segment of the transcriptional DNA template can be produced during PCR by using a reverse primer containing a polyT tail, such as 100T tail (SEQ ID NO: 31) (size can be 50-5000 T (SEQ ID NO: 32)), or after PCR by any other method, including, but not limited to, DNA ligation or in vitro recombination. Poly(A) tails also provide stability to RNAs and reduce their degradation. Generally, the length of a poly(A) tail positively correlates with the stability of the transcribed RNA. In some embodiments, the poly(A) tail is between 100 and 5000 adenosines (for example, SEQ ID NO: 33).

[0783] Poly(A) tails of RNAs can be further extended following in vitro transcription with the use of a poly(A) polymerase, such as E. coli poly(A) polymerase (E-PAP). In some embodiments, increasing the length of a poly(A) tail from 100 nucleotides to between 300 and 400 nucleotides (SEQ ID NO: 34) results in about a two-fold increase in the translation efficiency of the RNA. Additionally, the attachment of different chemical groups to the 3′ end can increase mRNA stability. Such attachment can contain modified/artificial nucleotides, aptamers and other compounds. For example, ATP analogs can be incorporated into the poly(A) tail using poly(A) polymerase. ATP analogs can further increase the stability of the RNA.

[0784] 5′ caps on also provide stability to RNA molecules. In some embodiments, RNAs produced by the methods disclosed herein include a 5′ cap. The 5′ cap is provided using techniques known in the art and described herein (Cougot, et al., Trends in Biochem. Sci., 29:436-444 (2001); Stepinski, et al., RNA, 7:1468-95 (2001); Elango, et al., Biochim. Biophys. Res. Commun., 330:958-966 (2005)).

[0785] The RNAs produced by the methods disclosed herein can also contain an internal ribosome entry site (IRES) sequence. The IRES sequence may be any viral, chromosomal or artificially designed sequence which initiates cap-independent ribosome binding to mRNA and facilitates the initiation of translation. Any solutes suitable for cell electroporation, which can contain factors facilitating cellular permeability and viability such as sugars, peptides, lipids, proteins, antioxidants, and surfactants can be included.

[0786] RNA can be introduced into target cells using any of a number of different methods, for instance, commercially available methods which include, but are not limited to, electroporation (Amaxa Nucleofector-II (Amaxa Biosystems, Cologne, Germany)), (ECM 830 (BTX) (Harvard Instruments, Boston, Mass.) or the Gene Pulser II (BioRad, Denver, Colo.), Multiporator (Eppendort, Hamburg Germany), cationic liposome mediated transfection using lipofection, polymer encapsulation, peptide mediated transfection, or biolistic particle delivery systems such as “gene guns” (see, for example, Nishikawa, et al. Hum Gene Ther., 12(8):861-70 (2001).

### Non-Viral Delivery Methods

[0787] In some embodiments, non-viral methods can be used to deliver a nucleic acid encoding a CAR described herein into a cell or tissue or a subject.

[0788] In some embodiments, the non-viral method includes the use of a transposon (also called a transposable element). In some embodiments, a transposon is a piece of DNA that can insert itself at a location in a genome, for example, a piece of DNA that is capable of self-replicating and inserting its copy into a genome, or a piece of DNA that can be spliced out of a longer nucleic acid and inserted into another place in a genome. For example, a transposon comprises a DNA sequence made up of inverted repeats flanking genes for transposition.

[0789] Exemplary methods of nucleic acid delivery using a transposon include a Sleeping Beauty transposon system (SBTS) and a piggyBac™ (PB) transposon system. See, for example, Aronovich et al. Hum. Mol. Genet. 20.R1(2011):R14-20; Singh et al. Cancer Res. 15(2008):2961-2971; Huang et al. Mol. Ther. 16(2008):580-589; Grabundzija et al. Mol. Ther. 18(2010):1200-1209; Kebriaei et al. Blood. 122.21(2013):166; Williams. Molecular Therapy 16.9(2008):1515-16; Bell et al. Nat. Protoc. 2.12(2007):3153-65; and Ding et al. Cell. 122.3(2005):473-83, all of which are incorporated herein by reference.

[0790] The SBTS includes two components: 1) a transposon containing a transgene and 2) a source of transposase enzyme. The transposase can transpose the transposon from a carrier plasmid (or other donor DNA) to a target DNA, such as a host cell chromosome/genome. For example, the transposase binds to the carrier plasmid/donor DNA, cuts the transposon (including transgene(s)) out of the plasmid, and inserts it into the genome of the host cell. See, for example, Aronovich et al. supra.

[0791] Exemplary transposons include a pT2-based transposon. See, for example, Grabundzija et al. Nucleic Acids Res. 41.3(2013):1829-47; and Singh et al. Cancer Res. 68.8(2008): 2961-2971, all of which are incorporated herein by reference. Exemplary transposases include a Tc1/mariner-type transposase, for example, the SB 10 transposase or the SB 11 transposase (a hyperactive transposase which can be expressed, for example, from a cytomegalovirus promoter). See, for example, Aronovich et al.; Kebriaei et al.; and Grabundzija et al., all of which are incorporated herein by reference.

[0792] Use of the SBTS permits efficient integration and expression of a transgene, for example, a nucleic acid encoding a CAR described herein. Provided herein are methods of generating a cell, for example, T cell or NK cell, that stably expresses a CAR described herein, for example, using a transposon system such as SBTS.

[0793] In accordance with methods described herein, in some embodiments, one or more nucleic acids, for example, plasmids, containing the SBTS components are delivered to a cell (for example, T or NK cell). For example, the nucleic acid(s) are delivered by standard methods of nucleic acid (for example, plasmid DNA) delivery, for example, methods described herein, for example, electroporation, transfection, or lipofection. In some embodiments, the nucleic acid contains a transposon comprising a transgene, for example, a nucleic acid encoding a CAR described herein. In some embodiments, the nucleic acid contains a transposon comprising a transgene (for example, a nucleic acid encoding a CAR described herein) as well as a nucleic acid sequence encoding a transposase enzyme. In other embodiments, a system with two nucleic acids is provided, for example, a dual-plasmid system, for example, where a first plasmid contains a transposon comprising a transgene, and a second plasmid contains a nucleic acid sequence encoding a transposase enzyme. For example, the first and the second nucleic acids are co-delivered into a host cell.

[0794] In some embodiments, cells, for example, T or NK cells, are generated that express a CAR described herein by using a combination of gene insertion using the SBTS and genetic editing using a nuclease (for example, Zinc finger nucleases (ZFNs), Transcription Activator-Like Effector Nucleases (TALENs), the CRISPR/Cas system, or engineered meganuclease re-engineered homing endonucleases).

[0795] In some embodiments, use of a non-viral method of delivery permits reprogramming of cells, for example, T or NK cells, and direct infusion of the cells into a subject. Advantages of non-viral vectors include but are not limited to the ease and relatively low cost of producing sufficient amounts required to meet a patient population, stability during storage, and lack of immunogenicity.

### Methods of Manufacture/Production

[0796] In some embodiments, the methods disclosed herein further include administering a T cell depleting agent after treatment with the cell (for example, an immune effector cell as described herein), thereby reducing (for example, depleting) the CAR-expressing cells (for example, the CD19CAR-expressing cells). Such T cell depleting agents can be used to effectively deplete CAR-expressing cells (for example, CD19CAR-expressing cells) to mitigate toxicity. In some embodiments, the CAR-expressing cells were manufactured according to a method herein, for example, assayed (for example, before or after transfection or transduction) according to a method herein.

[0797] In some embodiments, the T cell depleting agent is administered one, two, three, four, or five weeks after administration of the cell, for example, the population of immune effector cells, described herein.

[0798] In some embodiments, the T cell depleting agent is an agent that depletes CAR-expressing cells, for example, by inducing antibody dependent cell-mediated cytotoxicity (ADCC) and/or complement-induced cell death. For example, CAR-expressing cells described herein may also express an antigen (for example, a target antigen) that is recognized by molecules capable of inducing cell death, for example, ADCC or complement-induced cell death. For example, CAR expressing cells described herein may also express a target protein (for example, a receptor) capable of being targeted by an antibody or antibody fragment. Examples of such target proteins include, but are not limited to, EpCAM, VEGFR, integrins (for example, integrins αvβ3, α4, αI3/4β3, α4β7, α5β1, αvβ3, αv), members of the TNF receptor superfamily (for example, TRAIL-R1, TRAIL-R2), PDGF Receptor, interferon receptor, folate receptor, GPNMB, ICAM-1, HLA-DR, CEA, CA-125, MUC1, TAG-72, IL-6 receptor, 5T4, GD2, GD3, CD2, CD3, CD4, CD5, CD11, CD11a/LFA-1, CD15, CD18/ITGB2, CD19, CD20, CD22, CD23/lgE Receptor, CD25, CD28, CD30, CD33, CD38, CD40, CD41, CD44, CD51, CD52, CD62L, CD74, CD80, CD125, CD147/basigin, CD152/CTLA-4, CD154/CD40L, CD195/CCR5, CD319/SLAMF7, and EGFR, and truncated versions thereof (for example, versions preserving one or more extracellular epitopes but lacking one or more regions within the cytoplasmic domain).

[0799] In some embodiments, the CAR expressing cell co-expresses the CAR and the target protein, for example, naturally expresses the target protein or is engineered to express the target protein. For example, the cell, for example, the population of immune effector cells, can include a nucleic acid (for example, vector) comprising the CAR nucleic acid (for example, a CAR nucleic acid as described herein) and a nucleic acid encoding the target protein.

[0800] In some embodiments, the T cell depleting agent is a CD52 inhibitor, for example, an anti-CD52 antibody molecule, for example, alemtuzumab.

[0801] In other embodiments, the cell, for example, the population of immune effector cells, expresses a CAR molecule as described herein (for example, CD19CAR) and the target protein recognized by the T cell depleting agent. In some embodiments, the target protein is CD20. In embodiments where the target protein is CD20, the T cell depleting agent is an anti-CD20 antibody, for example, rituximab.

[0802] In further embodiments of any of the aforesaid methods, the methods further include transplanting a cell, for example, a hematopoietic stem cell, or a bone marrow, into the mammal.

[0803] In some embodiments, the invention features a method of conditioning a mammal prior to cell transplantation. The method includes administering to the mammal an effective amount of the cell comprising a CAR nucleic acid or polypeptide, for example, a CD19 CAR nucleic acid or polypeptide. In some embodiments, the cell transplantation is a stem cell transplantation, for example, a hematopoietic stem cell transplantation, or a bone marrow transplantation. In other embodiments, conditioning a subject prior to cell transplantation includes reducing the number of target-expressing cells in a subject, for example, CD19-expressing normal cells or CD19-expressing cancer cells.

### Elutriation

[0804] In some embodiments, the methods described herein feature an elutriation method that removes unwanted cells, for example, monocytes and blasts, thereby resulting in an improved enrichment of desired immune effector cells suitable for CAR expression. In some embodiments, the elutriation method described herein is optimized for the enrichment of desired immune effector cells suitable for CAR expression from a previously frozen sample, for example, a thawed sample. In some embodiments, the elutriation method described herein provides a preparation of cells with improved purity as compared to a preparation of cells collected from the elutriation protocols known in the art. In some embodiments, the elutriation method described herein includes using an optimized viscosity of the starting sample, for example, cell sample, for example, thawed cell sample, by dilution with certain isotonic solutions (for example, PBS), and using an optimized combination of flow rates and collection volume for each fraction collected by an elutriation device. Exemplary elutriation methods that could be applied in the present invention are described on pages 48-51 of WO 2017/117112, herein incorporated by reference in its entirety.

### Density Gradient Centrifugation

[0805] Manufacturing of adoptive cell therapeutic product requires processing the desired cells, for example, immune effector cells, away from a complex mixture of blood cells and blood elements present in peripheral blood apheresis starting materials. Peripheral blood-derived lymphocyte samples have been successfully isolated using density gradient centrifugation through Ficoll solution. However, Ficoll is not a preferred reagent for isolating cells for therapeutic use, as Ficoll is not qualified for clinical use. In addition, Ficoll contains glycol, which has toxic potential to the cells. Furthermore, Ficoll density gradient centrifugation of thawed apheresis products after cryopreservation yields a suboptimal T cell product, for example, as described in the Examples herein. For example, a loss of T cells in the final product, with a relative gain of non-T cells, especially undesirable B cells, blast cells and monocytes was observed in cell preparations isolated by density gradient centrifugation through Ficoll solution.

[0806] Without wishing to be bound by theory, it is believed that immune effector cells, for example, T cells, dehydrate during cryopreservation to become denser than fresh cells. Without wishing to be bound by theory, it is also believed that immune effector cells, for example, T cells, remain denser longer than the other blood cells, and thus are more readily lost during Ficoll density gradient separation as compared to other cells. Accordingly, without wishing to be bound by theory, a medium with a density greater than Ficoll is believed to provide improved isolation of desired immune effector cells in comparison to Ficoll or other mediums with the same density as Ficoll, for example, 1.077 g/mL.

[0807] In some embodiments, the density gradient centrifugation method described herein includes the use of a density gradient medium comprising iodixanol. In some embodiments, the density gradient medium comprises about 60% iodixanol in water.

[0808] In some embodiments, the density gradient centrifugation method described herein includes the use of a density gradient medium having a density greater than Ficoll. In some embodiments, the density gradient centrifugation method described herein includes the use of a density gradient medium having a density greater than 1.077 g/mL, for example, greater than 1.077 g/mL, greater than 1.1 g/mL, greater than 1.15 g/mL, greater than 1.2 g/mL, greater than 1.25 g/mL, greater than 1.3 g/mL, greater than 1.31 g/mL. In some embodiments, the density gradient medium has a density of about 1.32 g/mL.

[0809] Additional embodiments of density gradient centrifugation are described on pages 51-53 of WO 2017/117112, herein incorporated by reference in its entirety.

### Enrichment by Selection

[0810] Provided herein are methods for selection of specific cells to improve the enrichment of the desired immune effector cells suitable for CAR expression. In some embodiments, the selection comprises a positive selection, for example, selection for the desired immune effector cells. In some embodiments, the selection comprises a negative selection, for example, selection for unwanted cells, for example, removal of unwanted cells. In embodiments, the positive or negative selection methods described herein are performed under flow conditions, for example, by using a flow-through device, for example, a flow-through device described herein. Exemplary positive and negative selections are described on pages 53-57 of WO 2017/117112, herein incorporated by reference in its entirety. Selection methods can be performed under flow conditions, for example, by using a flow-through device, also referred to as a cell processing system, to further enrich a preparation of cells for desired immune effector cells, for example, T cells, suitable for CAR expression. Exemplary flow-through devices are described on pages 57-70 of WO 2017/117112, herein incorporated by reference in its entirety. Exemplary cell separation and debeading methods are described on pages 70-78 of WO 2017/117112, herein incorporated by reference in its entirety.

[0811] Selection procedures are not limited to ones described on pages 57-70 of WO 2017/117112. Negative T cell selection via removal of unwanted cells with CD19, CD14 and CD26 Miltenyi beads in combination with column technology (CliniMACS® Plus or CliniMACS® Prodigy®) or positive T cell selection with a combination of CD4 and CD8 Miltenyi beads and column technology (CliniMACS® Plus or CliniMACS® Prodigy®) can be used. Alternatively, column-free technology with releasable CD3 beads (GE Healthcare) can be used.

[0812] In addition, bead-free technologies such as ThermoGenesis X-series devices can be utilized as well.

### Clinical Applications

[0813] All of the processes herein may be conducted according to clinical good manufacturing practice (cGMP) standards.

[0814] The processes may be used for cell purification, enrichment, harvesting, washing, concentration or for cell media exchange, particularly during the collection of raw, starting materials (particularly cells) at the start of the manufacturing process, as well as during the manufacturing process for the selection or expansion of cells for cell therapy.

[0815] The cells may include any plurality of cells. The cells may be of the same cell type, or mixed cell types. In addition, the cells may be from one donor, such as an autologous donor or a single allogenic donor for cell therapy. The cells may be obtained from patients by, for example, leukapheresis or apheresis. The cells may include T cells, for example may include a population that has greater than 50% T cells, greater than 60% T cells, greater than 70% T cells, greater than 80% T cells, or 90% T cells.

[0816] Selection processes may be particularly useful in selecting cells prior to culture and expansion. For instance, paramagnetic particles coated with anti-CD3 and/or anti CD28 may be used to select T cells for expansion or for introduction of a nucleic acid encoding a chimeric antigen receptor (CAR) or other protein. Such a process is used to produce CTL019 T cells for treatment of acute lymphoblastic leukemia (ALL).

[0817] The debeading processes and modules disclosed herein may be particularly useful in the manufacture of cells for cell therapy, for example in purifying cells prior to, or after, culture and expansion. For instance, paramagnetic particles coated with anti-CD3 and/or anti CD28 antibodies may be used to selectively expand T cells, for example T cells that are, or will be, modified by introduction of a nucleic acid encoding a chimeric antigen receptor (CAR) or other protein, such that the CAR is expressed by the T cells. During the manufacture of such T cells, the debeading processes or modules may be used to separate T cells from the paramagnetic particles. Such a debeading process or module is used to produce, for example, CTL019 T cells for treatment of acute lymphoblastic leukemia (ALL).

[0818] In one such process, illustrated here by way of example, cells, for example, T cells, are collected from a donor (for example, a patient to be treated with an autologous chimeric antigen receptor T cell product) via apheresis (for example, leukapheresis). Collected cells may then be optionally purified, for example, by an elutriation step, or via positive or negative selection of target cells (for example, T cells). Paramagnetic particles, for example, anti-CD3/anti-CD28-coated paramagnetic particles, may then be added to the cell population, to expand the T cells. The process may also include a transduction step, wherein nucleic acid encoding one or more desired proteins, for example, a CAR, for example a CAR targeting CD19, is introduced into the cell. The nucleic acid may be introduced in a lentiviral vector. The cells, for example, the lentivirally transduced cells, may then be expanded for a period of days, for example, 1, 2, 3, 4, 5, 6, 7, 8, 9, 10, or more days, for example in the presence of a suitable medium. After expansion, the debeading processes/modules disclosed herein may be used to separate the desired T cells from the paramagnetic particles. The process may include one or more debeading steps according to the processes of the present disclosure. The debeaded cells may then be formulated for administration to the patient. Examples of CAR T cells and their manufacture are further described, for example, in WO2012/079000, which is incorporated herein by reference in its entirety. The systems and methods of the present disclosure may be used for any cell separation/purification/debeading processes described in or associated with WO2012/079000. Additional CAR T manufacturing processes are described in, for example, WO2016109410 and WO2017117112, herein incorporated by reference in their entireties.

[0819] The systems and methods herein may similarly benefit other cell therapy products by wasting fewer desirable cells, causing less cell trauma, and more reliably removing magnetic and any non-paramagnetic particles from cells with less or no exposure to chemical agents, as compared to conventional systems and methods.

[0820] Although only exemplary embodiments of the disclosure are specifically described above, it will be appreciated that modifications and variations of these examples are possible without departing from the spirit and intended scope of the disclosure. For example, the magnetic modules and systems containing them may be arranged and used in a variety of configurations in addition to those described. Besides, non-magnetic modules can be utilized as well. In addition, the systems and methods may include additional components and steps not specifically described herein. For instance, methods may include priming, where a fluid is first introduced into a component to remove bubbles and reduce resistance to cell suspension or buffer movement. Furthermore, embodiments may include only a portion of the systems described herein for use with the methods described herein. For example, embodiments may relate to disposable modules, hoses, etc. usable within non-disposable equipment to form a complete system able to separate or debead cells to produce a cell product.

[0821] Additional manufacturing methods and processes that can be combined with the present invention have been described in the art. For examples, pages 86-91 of WO 2017/117112 describe improved wash steps and improved manufacturing process.

### Sources of Immune Effector Cells

[0822] This section provides additional methods or steps for obtaining an input sample comprising desired immune effector cells, isolating and processing desired immune effector cells, for example, T cells, and removing unwanted materials, for example, unwanted cells. The additional methods or steps described in this section can be used in combination with any of the elutriation, density gradient centrifugation, selection under flow conditions, or improved wash step described in the preceding sections.

[0823] A source of cells, for example, T cells or natural killer (NK) cells, can be obtained from a subject. Examples of subjects include humans, monkeys, chimpanzees, dogs, cats, mice, rats, and transgenic species thereof. T cells can be obtained from a number of sources, including peripheral blood mononuclear cells, bone marrow, lymph node tissue, cord blood, thymus tissue, tissue from a site of infection, ascites, pleural effusion, spleen tissue, and tumors.

[0824] In some embodiments of the present disclosure, immune effector cells, for example, T cells, can be obtained from a unit of blood collected from a subject using any number of techniques known to the skilled artisan, and any of the methods disclosed herein, in any combination of steps thereof. In some embodiments, cells from the circulating blood of an individual are obtained by apheresis. The apheresis product typically contains lymphocytes, including T cells, monocytes, granulocytes, B cells, other nucleated white blood cells, red blood cells, and platelets. In some embodiments, the cells collected by apheresis may be washed to remove the plasma fraction and, optionally, to place the cells in an appropriate buffer or media for subsequent processing steps. In some embodiments, the cells are washed with phosphate buffered saline (PBS). In some embodiments, the wash solution lacks calcium and may lack magnesium or may lack many if not all divalent cations. In some embodiments, the cells are washed using the improved wash step described herein.

[0825] Initial activation steps in the absence of calcium can lead to magnified activation. As those of ordinary skill in the art would readily appreciate a washing step may be accomplished by methods known to those in the art, such as by using a semi-automated “flow-through” centrifuge (for example, the Cobe 2991 cell processor, the Baxter CytoMate™, or the Haemonetics Cell Saver 5), Haemonetics Cell Saver Elite (GE Healthcare Sepax or Sefia), or a device utilizing the spinning membrane filtration technology (Fresenius Kabi LOVO), according to the manufacturer’s instructions. After washing, the cells may be resuspended in a variety of biocompatible buffers, such as, for example, Ca-free, Mg-free PBS, PlasmaLyte A, PBS-EDTA supplemented with human serum albumin (HSA), or other saline solution with or without buffer. Alternatively, the undesirable components of the apheresis sample may be removed and the cells directly resuspended in culture media.

[0826] In some embodiments, desired immune effector cells, for example, T cells, are isolated from peripheral blood lymphocytes by lysing the red blood cells and depleting the monocytes, for example, by centrifugation through a PERCOLL™ gradient or by counterflow centrifugal elutriation.

[0827] The methods described herein can include, for example, selection of a specific subpopulation of immune effector cells, for example, T cells, that are a T regulatory cell-depleted population, for example, CD25+ depleted cells or CD25^{high} depleted cells, using, for example, a negative selection technique, for example, described herein. In some embodiments, the population of T regulatory-depleted cells contains less than 30%, 25%, 20%, 15%, 10%, 5%, 4%, 3%, 2%, 1% of CD25₊ cells or CD25^{high} cells.

[0828] In some embodiments, T regulatory cells, for example, CD25+ T cells or CD25^{high} T cells, are removed from the population using an anti-CD25 antibody, or fragment thereof, or a CD25-binding ligand, for example IL-2. In some embodiments, the anti-CD25 antibody, or fragment thereof, or CD25-binding ligand is conjugated to a substrate, for example, a bead, or is otherwise coated on a substrate, for example, a bead. In some embodiments, the anti-CD25 antibody, or fragment thereof, is conjugated to a substrate as described herein.

[0829] In some embodiments, the T regulatory cells, for example, CD25+ T cells or CD25^{high} T cells, are removed from the population using CD25 depleting reagent from Miltenyi™. In some embodiments, the ratio of cells to CD25 depletion reagent is 1e7 cells to 20 µL, or 1e7 cells to 15 µL, or 1e7 cells to 10 µL, or 1e7 cells to 5 µL, or 1e7 cells to 2.5 µL, or 1e7 cells to 1.25 µL. In some embodiments, for example, for T regulatory cells, greater than 500 million cells/ml is used. In some embodiments, a concentration of cells of 600, 700, 800, or 900 million cells/ml is used.

[0830] In some embodiments, the population of immune effector cells to be depleted includes about 6 × 10⁹ CD25+ T cells. In some embodiments, the population of immune effector cells to be depleted include about 1 × 10⁹ to 1× 10¹⁰ CD25+ T cell, and any integer value in between. In some embodiments, the resulting population T regulatory-depleted cells has 2 × 10⁹ T regulatory cells, for example, CD25+ cells or CD25^{high} cells, or less (for example, 1 × 10⁹, 5 × 10⁸, 1 × 10⁸, 5 × 10⁷, 1 × 10⁷, or less T regulatory cells).

[0831] In some embodiments, the T regulatory cells, for example, CD25+ cells or CD25^{high} cells, are removed from the population using the CliniMAC system with a depletion tubing set, such as, for example, tubing 162-01. In some embodiments, the CliniMAC system is run on a depletion setting such as, for example, DEPLETION2.1.

[0832] Without wishing to be bound by a particular theory, decreasing the level of negative regulators of immune cells (for example, decreasing the number of unwanted immune cells, for example, Treg cells), in a subject prior to apheresis or during manufacturing of a CAR-expressing cell product significantly reduces the risk of subject relapse. For example, methods of depleting Treg cells are known in the art. Methods of decreasing Treg cells include, but are not limited to, cyclophosphamide, anti-GITR antibody (an anti-GITR antibody described herein), CD25-depletion, and combinations thereof.

[0833] In some embodiments, the manufacturing methods comprise reducing the number of (for example, depleting) Treg cells prior to manufacturing of the CAR-expressing cell. For example, manufacturing methods comprise contacting the sample, for example, the apheresis sample, with an anti-GITR antibody and/or an anti-CD25 antibody (or fragment thereof, or a CD25-binding ligand), for example, to deplete Treg cells prior to manufacturing of the CAR-expressing cell (for example, T cell, NK cell) product.

[0834] Without wishing to be bound by a particular theory, decreasing the level of negative regulators of immune cells (for example, decreasing the number of unwanted immune cells, for example, Treg cells), in a subject prior to apheresis or during manufacturing of a CAR-expressing cell product can reduce the risk of a subject’s relapse. In some embodiments, a subject is pre-treated with one or more therapies that reduce Treg cells prior to collection of cells for CAR-expressing cell product manufacturing, thereby reducing the risk of subject relapse to CAR-expressing cell treatment. In some embodiments, methods of decreasing Treg cells include, but are not limited to, administration to the subject of one or more of cyclophosphamide, anti-GITR antibody, CD25-depletion, or a combination thereof. In some embodiments, methods of decreasing Treg cells include, but are not limited to, administration to the subject of one or more of cyclophosphamide, anti-GITR antibody, CD25-depletion, or a combination thereof. Administration of one or more of cyclophosphamide, anti-GITR antibody, CD25-depletion, or a combination thereof, can occur before, during or after an infusion of the CAR-expressing cell product. Administration of one or more of cyclophosphamide, anti-GITR antibody, CD25-depletion, or a combination thereof, can occur before, during or after an infusion of the CAR-expressing cell product.

[0835] In some embodiments, the manufacturing methods comprise reducing the number of (for example, depleting) Treg cells prior to manufacturing of the CAR-expressing cell. For example, manufacturing methods comprise contacting the sample, for example, the apheresis sample, with an anti-GITR antibody and/or an anti-CD25 antibody (or fragment thereof, or a CD25-binding ligand), for example, to deplete Treg cells prior to manufacturing of the CAR-expressing cell (for example, T cell, NK cell) product.

[0836] In some embodiments, a subject is pre-treated with cyclophosphamide prior to collection of cells for CAR-expressing cell product manufacturing, thereby reducing the risk of subject relapse to CAR-expressing cell treatment (for example, CTL019 treatment). In some embodiments, a subject is pre-treated with an anti-GITR antibody prior to collection of cells for CAR-expressing cell (for example, T cell or NK cell) product manufacturing, thereby reducing the risk of subject relapse to CAR-expressing cell treatment.

[0837] In some embodiments, the CAR-expressing cell (for example, T cell, NK cell) manufacturing process is modified to deplete Treg cells prior to manufacturing of the CAR-expressing cell (for example, T cell, NK cell) product (for example, a CTL019 product). In some embodiments, CD25-depletion is used to deplete Treg cells prior to manufacturing of the CAR-expressing cell (for example, T cell, NK cell) product (for example, a CTL019 product).

[0838] In some embodiments, the population of cells to be removed are neither the regulatory T cells or tumor cells, but cells that otherwise negatively affect the expansion and/or function of CART cells, for example cells expressing CD14, CD11b, CD33, CD15, or other markers expressed by potentially immune suppressive cells. In some embodiments, such cells are envisioned to be removed concurrently with regulatory T cells and/or tumor cells, or following said depletion, or in another order.

[0839] The methods described herein can include more than one selection step, for example, more than one depletion step. Enrichment of a T cell population by negative selection can be accomplished, for example, with a combination of antibodies directed to surface markers unique to the negatively selected cells. One method is cell sorting and/or selection via negative magnetic immunoadherence or flow cytometry that uses a cocktail of monoclonal antibodies directed to cell surface markers present on the cells negatively selected. For example, to enrich for CD4+ cells by negative selection, a monoclonal antibody cocktail can include antibodies to CD14, CD20, CD11b, CD16, HLA-DR, and CD8.

[0840] The methods described herein can further include removing cells from the population which express a tumor antigen, for example, a tumor antigen that does not comprise CD25, for example, CD19, CD30, CD38, CD123, CD20, CD14 or CD11b, to thereby provide a population of T regulatory-depleted, for example, CD25+ depleted or CD25^{high} depleted, and tumor antigen depleted cells that are suitable for expression of a CAR, for example, a CAR described herein. In some embodiments, tumor antigen expressing cells are removed simultaneously with the T regulatory, for example, CD25+ cells or CD25^{high} cells. For example, an anti-CD25 antibody, or fragment thereof, and an anti-tumor antigen antibody, or fragment thereof, can be attached to the same substrate, for example, bead, which can be used to remove the cells or an anti-CD25 antibody, or fragment thereof, or the anti-tumor antigen antibody, or fragment thereof, can be attached to separate beads, a mixture of which can be used to remove the cells. In other embodiments, the removal of T regulatory cells, for example, CD25+ cells or CD25^{high} cells, and the removal of the tumor antigen expressing cells is sequential, and can occur, for example, in either order.

[0841] Also provided are methods that include removing cells from the population which express a check point inhibitor, for example, a check point inhibitor described herein, for example, one or more of PD1+ cells, LAG3+ cells, and TIM3+ cells, to thereby provide a population of T regulatory-depleted, for example, CD25+ depleted cells, and check point inhibitor depleted cells, for example, PD1+, LAG3+ and/or TIM3+ depleted cells. Exemplary check point inhibitors include PD1, PD-L1, PD-L2, CTLA4, TIM3, CEACAM (for example, CEACAM-1, CEACAM-3 and/or CEACAM-5), LAG3, VISTA, BTLA, TIGIT, LAIR1, CD160, 2B4, CD80, CD86, B7-H3 (CD276), B7-H4 (VTCN1), HVEM (TNFRSF14 or CD270), KIR, A2aR, MHC class I, MHC class II, GAL9, adenosine, and TGF (for example, TGF beta), for example, as described herein. In some embodiments, check point inhibitor expressing cells are removed simultaneously with the T regulatory, for example, CD25+ cells or CD25^{high} cells. For example, an anti-CD25 antibody, or fragment thereof, and an anti-check point inhibitor antibody, or fragment thereof, can be attached to the same bead which can be used to remove the cells, or an anti-CD25 antibody, or fragment thereof, and the anti-check point inhibitor antibody, or fragment there, can be attached to separate beads, a mixture of which can be used to remove the cells. In other embodiments, the removal of T regulatory cells, for example, CD25+ cells or CD25^{high} cells, and the removal of the check point inhibitor expressing cells is sequential, and can occur, for example, in either order.

[0842] Methods described herein can include a positive selection step. For example, T cells can isolated by incubation with anti-CD3/anti-CD28 (for example, 3x28)-conjugated beads, such as Dynabeads® M-450 CD3/CD28 T, for a time period sufficient for positive selection of the desired T cells. In some embodiments, the time period is about 30 minutes. In some embodiments, the time period ranges from 30 minutes to 36 hours or longer and all integer values there between. In some embodiments, the time period is at least 1, 2, 3, 4, 5, or 6 hours. In some embodiments, the time period is 10 to 24 hours, for example, 24 hours. Longer incubation times may be used to isolate T cells in any situation where there are few T cells as compared to other cell types, such in isolating tumor infiltrating lymphocytes (TIL) from tumor tissue or from immunocompromised individuals. Further, use of longer incubation times can increase the efficiency of capture of CD8+ T cells. Thus, by simply shortening or lengthening the time T cells are allowed to bind to the CD3/CD28 beads and/or by increasing or decreasing the ratio of beads to T cells (as described further herein), subpopulations of T cells can be preferentially selected for or against at culture initiation or at other time points during the process. Additionally, by increasing or decreasing the ratio of anti-CD3 and/or anti-CD28 antibodies on the beads or other surface, subpopulations of T cells can be preferentially selected for or against at culture initiation or at other desired time points.

[0843] In some embodiments, a T cell population can be selected that expresses one or more of IFN-y, TNFα, IL-17A, IL-2, IL-3, IL-4, GM-CSF, IL-10, IL-13, granzyme B, and perforin, or other appropriate molecules, for example, other cytokines. Methods for screening for cell expression can be determined, for example, by the methods described in PCT Publication No.: WO 2013/126712.

[0844] For isolation of a desired population of cells by positive or negative selection, the concentration of cells and surface (for example, particles such as beads) can be varied. In some embodiments, it may be desirable to significantly decrease the volume in which beads and cells are mixed together (for example, increase the concentration of cells), to ensure maximum contact of cells and beads. For example, in some embodiments, a concentration of 10 billion cells/ml, 9 billion/ml, 8 billion/ml, 7 billion/ml, 6 billion/ml, or 5 billion/ml is used. In some embodiments, a concentration of 1 billion cells/ml is used. In some embodiments, a concentration of cells from 75, 80, 85, 90, 95, or 100 million cells/ml is used. In some embodiments, concentrations of 125 or 150 million cells/ml can be used.

[0845] Using high concentrations can result in increased cell yield, cell activation, and cell expansion. Further, use of high cell concentrations allows more efficient capture of cells that may weakly express target antigens of interest, such as CD28-negative T cells, or from samples where there are many tumor cells present (for example, leukemic blood, tumor tissue, etc.). Such populations of cells may have therapeutic value and would be desirable to obtain. For example, using high concentration of cells allows more efficient selection of CD8+ T cells that normally have weaker CD28 expression.

[0846] In some embodiments, it may be desirable to use lower concentrations of cells. By significantly diluting the mixture of T cells and surface (for example, particles such as beads), interactions between the particles and cells is minimized. This selects for cells that express high amounts of desired antigens to be bound to the particles. For example, CD4+ T cells express higher levels of CD28 and are more efficiently captured than CD8+ T cells in dilute concentrations. In some embodiments, the concentration of cells used is 5 × 10⁶ /ml. In some embodiments, the concentration used can be from about 1 × 10⁵ /ml to 1 × 10⁶ /ml, and any integer value in between.

[0847] In some embodiments, the cells may be incubated on a rotator for varying lengths of time at varying speeds at either 2-10° C. or at room temperature.

[0848] In some embodiments, a plurality of the immune effector cells of the population do not express diaglycerol kinase (DGK), for example, is DGK-deficient. In some embodiments, a plurality of the immune effector cells of the population do not express Ikaros, for example, is Ikaros-deficient. In some embodiments, a plurality of the immune effector cells of the population do not express DGK and Ikaros, for example, is both DGK and Ikaros-deficient.

[0849] T cells for stimulation can also be frozen after a washing step. Wishing not to be bound by theory, the freeze and subsequent thaw step provides a more uniform product by removing granulocytes and to some extent monocytes in the cell population. After the washing step that removes plasma and platelets, the cells may be suspended in a freezing solution. While many freezing solutions and parameters are known in the art and will be useful in this context, one method involves using PBS containing 20% DMSO and 8% human serum albumin, or culture media containing 10% Dextran 40 and 5% Dextrose, 20% Human Serum Albumin and 7.5% DMSO, or 31.25% Plasmalyte-A, 31.25% Dextrose 5%, 0.45% NaCl, 10% Dextran 40 and 5% Dextrose, 20% Human Serum Albumin, and 7.5% DMSO or other suitable cell freezing media containing for example, Hespan and PlasmaLyte A, the cells then are frozen to -80° C. at a rate of 1° per minute and stored in the vapor phase of a liquid nitrogen storage tank. Other methods of controlled freezing may be used as well as uncontrolled freezing immediately at -20° C. or in liquid nitrogen.

[0850] In some embodiments, cryopreserved cells are thawed and washed as described herein and allowed to rest for one hour at room temperature prior to activation using the methods of the present invention.

[0851] Also contemplated in the context of the invention is the collection of blood samples or apheresis product from a subject at a time period prior to when the expanded cells as described herein might be needed. As such, the source of the cells to be expanded can be collected at any time point necessary, and desired cells, such as T cells, isolated and frozen for later use in immune effector cell therapy for any number of diseases or conditions that would benefit from immune effector cell therapy, such as those described herein. In some embodiments a blood sample or an apheresis is taken from a generally healthy subject. In some embodiments, a blood sample or an apheresis is taken from a generally healthy subject who is at risk of developing a disease, but who has not yet developed a disease, and the cells of interest are isolated and frozen for later use. In some embodiments, the T cells may be expanded, frozen, and used at a later time. In some embodiments, samples are collected from a patient shortly after diagnosis of a particular disease as described herein but prior to any treatments. In some embodiments, the cells are isolated from a blood sample or an apheresis from a subject prior to any number of relevant treatment modalities, including but not limited to treatment with agents such as natalizumab, efalizumab, antiviral agents, chemotherapy, radiation, immunosuppressive agents, such as cyclosporin, azathioprine, methotrexate, mycophenolate, and FK506, antibodies, or other immunoablative agents such as CAMPATH, anti-CD3 antibodies, cytoxan, fludarabine, cyclosporin, FK506, rapamycin, mycophenolic acid, steroids, FR901228, and irradiation.

[0852] In some embodiments of the present invention, T cells are obtained from a patient directly following treatment that leaves the subject with functional T cells. In this regard, it has been observed that following certain cancer treatments, in particular treatments with drugs that damage the immune system, shortly after treatment during the period when patients would normally be recovering from the treatment, the quality of T cells obtained may be optimal or improved for their ability to expand ex vivo. Likewise, following ex vivo manipulation using the methods described herein, these cells may be in a preferred state for enhanced engraftment and in vivo expansion. Thus, it is contemplated within the context of the present invention to collect blood cells, including T cells, dendritic cells, or other cells of the hematopoietic lineage, during this recovery phase. Further, in some embodiments, mobilization (for example, mobilization with GM-CSF) and conditioning regimens can be used to create a condition in a subject wherein repopulation, recirculation, regeneration, and/or expansion of particular cell types is favored, especially during a defined window of time following therapy. Illustrative cell types include T cells, B cells, dendritic cells, and other cells of the immune system.

[0853] In some embodiments, the immune effector cells expressing a CAR molecule, for example, a CAR molecule described herein, are obtained from a subject that has received a low, immune enhancing dose of an mTOR inhibitor. In some embodiments, the population of immune effector cells, for example, T cells, to be engineered to express a CAR, are harvested after a sufficient time, or after sufficient dosing of the low, immune enhancing, dose of an mTOR inhibitor, such that the level of PD1 negative immune effector cells, for example, T cells, or the ratio of PD1 negative immune effector cells, for example, T cells/ PD1 positive immune effector cells, for example, T cells, in the subject or harvested from the subject has been, at least transiently, increased.

[0854] In other embodiments, population of immune effector cells, for example, T cells, which have, or will be engineered to express a CAR, can be treated ex vivo by contact with an amount of an mTOR inhibitor that increases the number of PD1 negative immune effector cells, for example, T cells or increases the ratio of PD1 negative immune effector cells, for example, T cells/ PD1 positive immune effector cells, for example, T cells.

[0855] It is recognized that the methods of the application can utilize culture media conditions comprising 5% or less, for example 2%, human AB serum, and employ known culture media conditions and compositions, for example those described in Smith et al., “Ex vivo expansion of human T cells for adoptive immunotherapy using the novel Xeno-free CTS™ Immune Cell Serum Replacement” Clinical & Translational Immunology (2015) 4, e31; doi:10.1038/cti.2014.31.

[0856] In some embodiments, the methods of the application can utilize media conditions comprising at least about 0.1%, 0.5%, 1.0%, 1.5%, 2%, 2.5%, 3%, 3.5%, 4%, 4.5%, 5%, 6%, 7%, 8%, 9% or 10% serum. In some embodiments, the media comprises about 0.5%-5%, about 0.5%-4.5%, about 0.5%-4%, about 0.5%-3.5%, about 0.5%-3%, about 0.5%-2.5%, about 0.5%-2%, about 0.5%-1.5%, about 0.5%-1.0%, about 1.0%-5%, about 1.5%-5%, about 2%-5%, about 2.5%-5%, about 3%-5%, about 3.5%-5%, about 4%-5%, or about 4.5%-5% serum. In some embodiments, the media comprises about 0.5% serum. In some embodiments, the media comprises about 0.5% serum. In some embodiments, the media comprises about 1% serum. In some embodiments, the media comprises about 1.5% serum. In some embodiments, the media comprises about 2% serum. In some embodiments, the media comprises about 2.5% serum. In some embodiments, the media comprises about 3% serum. In some embodiments, the media comprises about 3.5% serum. In some embodiments, the media comprises about 4% serum. In some embodiments, the media comprises about 4.5% serum. In some embodiments, the media comprises about 5% serum. In some embodiments, the serum comprises human serum, e.g., human AB serum. In some embodiments, the serum is human serum that has been allowed to naturally coagulate after collection, e.g., off-the-clot (OTC) serum. In some embodiments, the serum is plasma-derived serum human serum. Plasma-derived serum can be produced by defibrinating pooled human plasma collected in the presence of an anticoagulant, e.g., sodium citrate.

[0857] In some embodiments, the methods of the application can utilize culture media conditions comprising serum-free medium. In some embodiments, the serum free medium is OpTmizer™ CTS™ (LifeTech), Immunocult™ XF (Stemcell technologies), CellGro™ (CellGenix), TexMacs™ (Miltenyi), Stemline™ (Sigma), Xvivo15™ (Lonza), PrimeXV® (Irvine Scientific), or StemXVivo® (RandD systems). The serum-free medium can be supplemented with a serum substitute such as ICSR (immune cell serum replacement) from LifeTech. The level of serum substitute (for example, ICSR) can be, for example, up to 5%, for example, about 1%, 2%, 3%, 4%, or 5%. In some embodiments, the serum-free medium can be supplemented with serum, e.g., human serum, e.g., human AB serum. In some embodiments, the serum is human serum that has been allowed to naturally coagulate after collection, e.g., off-the-clot (OTC) serum. In some embodiments, the serum is plasma-derived human serum. Plasma-derived serum can be produced by defibrinating pooled human plasma collected in the presence of an anticoagulant, e.g., sodium citrate.

[0858] In some embodiments, a T cell population is diaglycerol kinase (DGK)-deficient. DGK-deficient cells include cells that do not express DGK RNA or protein, or have reduced or inhibited DGK activity. DGK-deficient cells can be generated by genetic approaches, for example, administering RNA-interfering agents, for example, siRNA, shRNA, miRNA, to reduce or prevent DGK expression. Alternatively, DGK-deficient cells can be generated by treatment with DGK inhibitors described herein.

[0859] In some embodiments, a T cell population is Ikaros-deficient. Ikaros-deficient cells include cells that do not express Ikaros RNA or protein, or have reduced or inhibited Ikaros activity, Ikaros-deficient cells can be generated by genetic approaches, for example, administering RNA-interfering agents, for example, siRNA, shRNA, miRNA, to reduce or prevent Ikaros expression. Alternatively, Ikaros-deficient cells can be generated by treatment with Ikaros inhibitors, for example, lenalidomide.

[0860] In embodiments, a T cell population is DGK-deficient and Ikaros-deficient, for example, does not express DGK and Ikaros, or has reduced or inhibited DGK and Ikaros activity. Such DGK and Ikaros-deficient cells can be generated by any of the methods described herein.

[0861] In some embodiments, the NK cells are obtained from the subject. In some embodiments, the NK cells are an NK cell line, for example, NK-92 cell line (Conkwest).

### Allogeneic CAR-Expressing Cells

[0862] In embodiments described herein, the immune effector cell can be an allogeneic immune effector cell, for example, T cell or NK cell. For example, the cell can be an allogeneic T cell, for example, an allogeneic T cell lacking expression of a functional T cell receptor (TCR) and/or human leukocyte antigen (HLA), for example, HLA class I and/or HLA class II.

[0863] A T cell lacking a functional TCR can be, for example, engineered such that it does not express any functional TCR on its surface, engineered such that it does not express one or more subunits that comprise a functional TCR (for example, engineered such that it does not express (or exhibits reduced expression) of TCR alpha, TCR beta, TCR gamma, TCR delta, TCR epsilon, and/or TCR zeta) or engineered such that it produces very little functional TCR on its surface. Alternatively, the T cell can express a substantially impaired TCR, for example, by expression of mutated or truncated forms of one or more of the subunits of the TCR. The term “substantially impaired TCR” means that this TCR will not elicit an adverse immune reaction in a host.

[0864] A T cell described herein can be, for example, engineered such that it does not express a functional HLA on its surface. For example, a T cell described herein, can be engineered such that cell surface expression HLA, for example, HLA class 1 and/or HLA class II, is downregulated. In some embodiments, downregulation of HLA may be accomplished by reducing or eliminating expression of beta-2 microglobulin (B2M).

[0865] In some embodiments, the T cell can lack a functional TCR and a functional HLA, for example, HLA class I and/or HLA class II.

[0866] Modified T cells that lack expression of a functional TCR and/or HLA can be obtained by any suitable means, including a knock out or knock down of one or more subunit of TCR or HLA. For example, the T cell can include a knock down of TCR and/or HLA using siRNA, shRNA, clustered regularly interspaced short palindromic repeats (CRISPR) transcription-activator like effector nuclease (TALEN), or zinc finger endonuclease (ZFN).

[0867] In some embodiments, the allogeneic cell can be a cell which does not express or expresses at low levels an inhibitory molecule, for example by any method described herein. For example, the cell can be a cell that does not express or expresses at low levels an inhibitory molecule, for example, that can decrease the ability of a CAR-expressing cell to mount an immune effector response. Examples of inhibitory molecules include PD1, PD-L1, PD-L2, CTLA4, TIM3, CEACAM (for example, CEACAM-1, CEACAM-3 and/or CEACAM-5), LAG3, VISTA, BTLA, TIGIT, LAIR1, CD160, 2B4, CD80, CD86, B7-H3 (CD276), B7-H4 (VTCN1), HVEM (TNFRSF14 or CD270), KIR, A2aR, MHC class I, MHC class II, GAL9, adenosine, and TGF (for example, TGF beta). Inhibition of an inhibitory molecule, for example, by inhibition at the DNA, RNA or protein level, can optimize a CAR-expressing cell performance. In embodiments, an inhibitory nucleic acid, for example, an inhibitory nucleic acid, for example, a dsRNA, for example, an siRNA or shRNA, a clustered regularly interspaced short palindromic repeats (CRISPR), a transcription-activator like effector nuclease (TALEN), or a zinc finger endonuclease (ZFN), for example, as described herein, can be used.

### siRNA and shRNA to Inhibit TCR or HLA

[0868] In some embodiments, TCR expression and/or HLA expression can be inhibited using siRNA or shRNA that targets a nucleic acid encoding a TCR and/or HLA, and/or an inhibitory molecule described herein (for example, PD1, PD-L1, PD-L2, CTLA4, TIM3, CEACAM (for example, CEACAM-1, CEACAM-3 and/or CEACAM-5), LAG3, VISTA, BTLA, TIGIT, LAIR1, CD160, 2B4, CD80, CD86, B7-H3 (CD276), B7-H4 (VTCN1), HVEM (TNFRSF14 or CD270), KIR, A2aR, MHC class I, MHC class II, GAL9, adenosine, and TGF beta), in a cell, for example, T cell.

[0869] Expression systems for siRNA and shRNAs, and exemplary shRNAs, are described, for example, in paragraphs 649 and 650 of International Application WO2015/142675, filed Mar. 13, 2015, which is incorporated by reference in its entirety.

### CRISPR to Inhibit TCR or HLA

[0870] “CRISPR” or “CRISPR to TCR and/or HLA” or “CRISPR to inhibit TCR and/or HLA” as used herein refers to a set of clustered regularly interspaced short palindromic repeats, or a system comprising such a set of repeats. “Cas”, as used herein, refers to a CRISPR-associated protein. A “CRISPR/Cas” system refers to a system derived from CRISPR and Cas which can be used to silence or mutate a TCR and/or HLA gene, and/or an inhibitory molecule described herein (for example, PD1, PD-L1, PD-L2, CTLA4, TIM3, CEACAM (for example, CEACAM-1, CEACAM-3 and/or CEACAM-5), LAG3, VISTA, BTLA, TIGIT, LAIR1, CD160, 2B4, CD80, CD86, B7-H3 (CD276), B7-H4 (VTCN1), HVEM (TNFRSF14 or CD270), KIR, A2aR, MHC class I, MHC class II, GAL9, adenosine, and TGF beta), in a cell, for example, T cell.

[0871] The CRISPR/Cas system, and uses thereof, are described, for example, in paragraphs 651-658 of International Application WO2015/142675, filed Mar. 13, 2015, which is incorporated by reference in its entirety.

### TALEN to Inhibit TCR and/or HLA

[0872] “TALEN” or “TALEN to HLA and/or TCR” or “TALEN to inhibit HLA and/or TCR” refers to a transcription activator-like effector nuclease, an artificial nuclease which can be used to edit the HLA and/or TCR gene, and/or an inhibitory molecule described herein (for example, PD1, PD-L1, PD-L2, CTLA4, TIM3, CEACAM (for example, CEACAM-1, CEACAM-3 and/or CEACAM-5), LAG3, VISTA, BTLA, TIGIT, LAIR1, CD160, 2B4, CD80, CD86, B7-H3 (CD276), B7-H4 (VTCN1), HVEM (TNFRSF14 or CD270), KIR, A2aR, MHC class I, MHC class II, GAL9, adenosine, and TGF beta), in a cell, for example, T cell.

[0873] TALENs, and uses thereof, are described, for example, in paragraphs 659-665 of International Application WO2015/142675, filed Mar. 13, 2015, which is incorporated by reference in its entirety.

### Zinc Finger Nuclease to Inhibit HLA and/or TCR

[0874] “ZFN” or “Zinc Finger Nuclease” or “ZFN to HLA and/or TCR” or “ZFN to inhibit HLA and/or TCR” refer to a zinc finger nuclease, an artificial nuclease which can be used to edit the HLA and/or TCR gene, and/or an inhibitory molecule described herein (for example, PD1, PD-L1, PD-L2, CTLA4, TIM3, CEACAM (for example, CEACAM-1, CEACAM-3 and/or CEACAM-5), LAG3, VISTA, BTLA, TIGIT, LAIR1, CD160, 2B4, CD80, CD86, B7-H3 (CD276), B7-H4 (VTCN1), HVEM (TNFRSF14 or CD270), KIR, A2aR, MHC class I, MHC class II, GAL9, adenosine, and TGF beta), in a cell, for example, T cell.

[0875] ZFNs, and uses thereof, are described, for example, in paragraphs 666-671 of International Application WO2015/142675, filed Mar. 13, 2015, which is incorporated by reference in its entirety.

### Telomerase Expression

[0876] Telomeres play a crucial role in somatic cell persistence, and their length is maintained by telomerase (TERT). Telomere length in CLL cells may be very short (Roth et al., “Significantly shorter telomeres in T-cells of patients with ZAP-70+/CD38 chronic lymphocytic leukaemia” British Journal of Haematology, 143, 383-386., Aug. 28, 2008), and may be even shorter in manufactured CAR-expressing cells, for example, CART19 cells, limiting their potential to expand after adoptive transfer to a patient. Telomerase expression can rescue CAR-expressing cells from replicative exhaustion.

[0877] While not wishing to be bound by any particular theory, in some embodiments, a therapeutic T cell has short term persistence in a patient, due to shortened telomeres in the T cell; accordingly, transfection with a telomerase gene can lengthen the telomeres of the T cell and improve persistence of the T cell in the patient. See Carl June, “Adoptive T cell therapy for cancer in the clinic”, Journal of Clinical Investigation, 117:1466-1476 (2007). Thus, in some embodiments, an immune effector cell, for example, a T cell, ectopically expresses a telomerase subunit, for example, the catalytic subunit of telomerase, for example, TERT, for example, hTERT. In some embodiments, this disclosure provides a method of producing a CAR-expressing cell, comprising contacting a cell with a nucleic acid encoding a telomerase subunit, for example, the catalytic subunit of telomerase, for example, TERT, for example, hTERT. The cell may be contacted with the nucleic acid before, simultaneous with, or after being contacted with a construct encoding a CAR.

[0878] Telomerase expression may be stable (for example, the nucleic acid may integrate into the cell’s genome) or transient (for example, the nucleic acid does not integrate, and expression declines after a period of time, for example, several days). Stable expression may be accomplished by transfecting or transducing the cell with DNA encoding the telomerase subunit and a selectable marker, and selecting for stable integrants. Alternatively or in combination, stable expression may be accomplished by site-specific recombination, for example, using the Cre/Lox or FLP/FRT system.

[0879] Transient expression may involve transfection or transduction with a nucleic acid, for example, DNA or RNA such as mRNA. In some embodiments, transient mRNA transfection avoids the genetic instability sometimes associated with stable transfection with TERT. Transient expression of exogenous telomerase activity is described, for example, in International Application WO2014/130909, which is incorporated by reference herein in its entirety. In embodiments, mRNA-based transfection of a telomerase subunit is performed according to the messenger RNA Therapeutics™ platform commercialized by Moderna Therapeutics. For instance, the method may be a method described in U.S. Pat. No. 8710200, 8822663, 8680069, 8754062, 8664194, or 8680069.

[0880] In some embodiments, hTERT has the amino acid sequence of GenBank Protein ID AAC51724.1 (Meyerson et al., “hEST2, the Putative Human Telomerase Catalytic Subunit Gene, Is Up-Regulated in Tumor Cells and during Immortalization” Cell Volume 90, Issue 4, 22 Aug. 1997, Pages 785-795):

MPRAPRCRAVRSLLRSHYREVLPLATFVRRLGPQGWRLVQRGDPAAFRAL
VAQCLVCVPWDARPPPAAPSFRQVSCLKELVARVLQRLCERGAKNVLAFG
FALLDGARGGPPEAFTTSVRSYLPNTVTDALRGSGAWGLLLRRVGDDVLV
HLLARCALFVLVAPSCAYQVCGPPLYQLGAATQARPPPHASGPRRRLGCE
RAWNHSVREAGVPLGLPAPGARRRGGSASRSLPLPKRPRRGAAPEPERTP
VGQGSWAHPGRTRGPSDRGFCVVSPARPAEEATSLEGALSGTRHSHPSVG
RQHHAGPPSTSRPPRPWDTPCPPVYAETKHFLYSSGDKEQLRPSFLLSSL
RPSLTGARRLVETIFLGSRPWMPGTPRRLPRLPQRYWQMRPLFLELLGNH
AQCPYGVLLKTHCPLRAAVTPAAGVCAREKPQGSVAAPEEEDTDPRRLVQ
LLRQHSSPWQVYGFVRACLRRLVPPGLWGSRHNERRFLRNTKKFISLGKH
AKLSLQELTWKMSVRGCAWLRRSPGVGCVPAAEHRLREEILAKFLHWLMS
VYVVELLRSFFYVTETTFQKNRLFFYRKSVWSKLQSIGIRQHLKRVQLRE
LSEAEVRQHREARPALLTSRLRFIPKPDGLRPIVNMDYVVGARTFRREKR
AERLTSRVKALFSVLNYERARRPGLLGASVLGLDDIHRAWRTFVLRVRAQ
DPPPELYFVKVDVTGAYDTIPQDRLTEVIASIIKPQNTYCVRRYAVVQKA
AHGHVRKAFKSHVSTLTDLQPYMRQFVAHLQETSPLRDAVVIEQSSSLNE
ASSGLFDVFLRFMCHHAVRIRGKSYVQCQGIPQGSILSTLLCSLCYGDME
NKLFAGIRRDGLLLRLVDDFLLVTPHLTHAKTFLRTLVRGVPEYGCVVNL
RKTVVNFPVEDEALGGTAFVQMPAHGLFPWCGLLLDTRTLEVQSDYSSYA
RTSIRASLTFNRGFKAGRNMRRKLFGVLRLKCHSLFLDLQVNSLQTVCTN
IYKILLLQAYRFHACVLQLPFHQQVWKNPTFFLRVISDTASLCYSILKAK
NAGMSLGAKGAAGPLPSEAVQWLCHQAFLLKLTRHRVTYVPLLGSLRTAQ
TQLSRKLPGTTLTALEAAANPALPSDFKTILD (SEQ ID NO: 284)

[0881] In some embodiments, the hTERT has a sequence at least 80%, 85%, 90%, 95%, 96%, 97%, 98%, or 99% identical to the sequence of SEQ ID NO: 284. In some embodiments, the hTERT has a sequence of SEQ ID NO: 284. In some embodiments, the hTERT comprises a deletion (for example, of no more than 5, 10, 15, 20, or 30 amino acids) at the N-terminus, the C-terminus, or both. In some embodiments, the hTERT comprises a transgenic amino acid sequence (for example, of no more than 5, 10, 15, 20, or 30 amino acids) at the N-terminus, the C-terminus, or both.

[0882] In some embodiments, the hTERT is encoded by the nucleic acid sequence of GenBank Accession No. AF018167 (Meyerson et al., “hEST2, the Putative Human Telomerase Catalytic Subunit Gene, Is Up-Regulated in Tumor Cells and during Immortalization” Cell Volume 90, Issue 4, 22 Aug. 1997, Pages 785-795).

### Activation and Expansion of Immune Effector Cells (for Example, T Cells)

[0883] Immune effector cells such as T cells generated or enriched by the methods described herein may be activated and expanded generally using methods as described, for example, in U.S. Patents 6,352,694; 6,534,055; 6,905,680; 6,692,964; 5,858,358; 6,887,466; 6,905,681; 7,144,575; 7,067,318; 7,172,869; 7,232,566; 7,175,843; 5,883,223; 6,905,874; 6,797,514; 6,867,041; and U.S. Pat. Application Publication No. 20060121005.

[0884] Generally, a population of immune effector cells may be expanded by contact with a surface having attached thereto an agent that stimulates a CD3/TCR complex associated signal and a ligand that stimulates a costimulatory molecule on the surface of the T cells. In particular, T cell populations may be stimulated as described herein, such as by contact with an anti-CD3 antibody, or antigen-binding fragment thereof, or an anti-CD2 antibody immobilized on a surface, or by contact with a protein kinase C activator (for example, bryostatin) in conjunction with a calcium ionophore. For costimulation of an accessory molecule on the surface of the T cells, a ligand that binds the accessory molecule is used. For example, a population of T cells can be contacted with an anti-CD3 antibody and an anti-CD28 antibody, under conditions appropriate for stimulating proliferation of the T cells. To stimulate proliferation of either CD4+ T cells or CD8+ T cells, an anti-CD3 antibody and an anti-CD28 antibody can be used. Examples of an anti-CD28 antibody include 9.3, B-T3, XR-CD28 (Diaclone, Besançon, France) can be used as can other methods commonly known in the art (Berg et al., Transplant Proc. 30(8):3975-3977, 1998; Haanen et al., J. Exp. Med. 190(9):13191328, 1999; Garland et al., J. Immunol Meth. 227(1-2):53-63, 1999).

[0885] In some embodiments, the primary stimulatory signal and the costimulatory signal for the T cell may be provided by different protocols. For example, the agents providing each signal may be in solution or coupled to a surface. When coupled to a surface, the agents may be coupled to the same surface (i.e., in “cis” formation) or to separate surfaces (i.e., in “trans” formation). Alternatively, one agent may be coupled to a surface and the other agent in solution. In some embodiments, the agent providing the costimulatory signal is bound to a cell surface and the agent providing the primary activation signal is in solution or coupled to a surface. In some embodiments, both agents can be in solution. In some embodiments, the agents may be in soluble form, and then cross-linked to a surface, such as a cell expressing Fc receptors or an antibody or other binding agent which will bind to the agents. In this regard, see for example, U.S. Pat. Application Publication Nos. 20040101519 and 20060034810 for artificial antigen presenting cells (aAPCs) that are contemplated for use in activating and expanding T cells in the present invention.

[0886] In some embodiments, the two agents are immobilized on beads, either on the same bead, i.e., “cis,” or to separate beads, i.e., “trans.” By way of example, the agent providing the primary activation signal is an anti-CD3 antibody or an antigen-binding fragment thereof and the agent providing the costimulatory signal is an anti-CD28 antibody or antigen-binding fragment thereof; and both agents are co-immobilized to the same bead in equivalent molecular amounts. In some embodiments, a 1:1 ratio of each antibody bound to the beads for CD4+ T cell expansion and T cell growth is used. In some embodiments of the present invention, a ratio of anti CD3:CD28 antibodies bound to the beads is used such that an increase in T cell expansion is observed as compared to the expansion observed using a ratio of 1:1. In some embodiments an increase of from about 1 to about 3 fold is observed as compared to the expansion observed using a ratio of 1:1. In some embodiments, the ratio of CD3:CD28 antibody bound to the beads ranges from 100:1 to 1:100 and all integer values there between. In some embodiments, more anti-CD28 antibody is bound to the particles than anti-CD3 antibody, i.e., the ratio of CD3:CD28 is less than one. In some embodiments, the ratio of anti CD28 antibody to anti CD3 antibody bound to the beads is greater than 2:1. In some embodiments, a 1:100 CD3:CD28 ratio of antibody bound to beads is used. In some embodiments, a 1:75 CD3:CD28 ratio of antibody bound to beads is used. In some embodiments, a 1:50 CD3:CD28 ratio of antibody bound to beads is used. In some embodiments, a 1:30 CD3:CD28 ratio of antibody bound to beads is used. In some embodiments, a 1:10 CD3:CD28 ratio of antibody bound to beads is used. In some embodiments, a 1:3 CD3:CD28 ratio of antibody bound to the beads is used. In some embodiments, a 3:1 CD3:CD28 ratio of antibody bound to the beads is used.

[0887] Ratios of particles to cells from 1:500 to 500:1 and any integer values in between may be used to stimulate T cells or other target cells. As those of ordinary skill in the art can readily appreciate, the ratio of particles to cells may depend on particle size relative to the target cell. For example, small sized beads could only bind a few cells, while larger beads could bind many. In some embodiments the ratio of cells to particles ranges from 1:100 to 100:1 and any integer values in-between and in some embodiments the ratio comprises 1:9 to 9:1 and any integer values in between, can also be used to stimulate T cells. The ratio of anti-CD3- and anti-CD28-coupled particles to T cells that result in T cell stimulation can vary as noted above, however certain suitable values include 1:100, 1:50, 1:40, 1:30, 1:20, 1:10, 1:9, 1:8, 1:7, 1:6, 1:5, 1:4, 1:3, 1:2, 1:1, 2:1, 3:1, 4:1, 5:1, 6:1, 7:1, 8:1, 9:1, 10:1, and 15:1 with one suitable ratio being at least 1:1 particles per T cell. In some embodiments, a ratio of particles to cells of 1:1 or less is used. In some embodiments, a suitable particle: cell ratio is 1:5. In some embodiments, the ratio of particles to cells can be varied depending on the day of stimulation. For example, in some embodiments, the ratio of particles to cells is from 1:1 to 10:1 on the first day and additional particles are added to the cells every day or every other day thereafter for up to 10 days, at final ratios of from 1:1 to 1:10 (based on cell counts on the day of addition). In some embodiments, the ratio of particles to cells is 1:1 on the first day of stimulation and adjusted to 1:5 on the third and fifth days of stimulation. In some embodiments, particles are added on a daily or every other day basis to a final ratio of 1:1 on the first day, and 1:5 on the third and fifth days of stimulation. In some embodiments, the ratio of particles to cells is 2:1 on the first day of stimulation and adjusted to 1:10 on the third and fifth days of stimulation. In some embodiments, particles are added on a daily or every other day basis to a final ratio of 1:1 on the first day, and 1:10 on the third and fifth days of stimulation. One of skill in the art will appreciate that a variety of other ratios may be suitable for use in the present invention. In particular, ratios will vary depending on particle size and on cell size and type. In some embodiments, the most typical ratios for use are in the neighborhood of 1:1, 2:1 and 3:1 on the first day.

[0888] In some embodiments, the cells, such as T cells, are combined with agent-coated beads, the beads and the cells are subsequently separated, and then the cells are cultured. In some embodiments, prior to culture, the agent-coated beads and cells are not separated but are cultured together. In some embodiments, the beads and cells are first concentrated by application of a force, such as a magnetic force, resulting in increased ligation of cell surface markers, thereby inducing cell stimulation.

[0889] By way of example, cell surface proteins may be ligated by allowing paramagnetic beads to which anti-CD3 and anti-CD28 are attached (3×28 beads) to contact the T cells. In some embodiments the cells (for example, 10⁴ to 10⁹ T cells) and beads (for example, Dynabeads® M-450 CD3/CD28 T paramagnetic beads at a ratio of 1:1) are combined in a buffer, for example PBS (without divalent cations such as, calcium and magnesium). Again, those of ordinary skill in the art can readily appreciate any cell concentration may be used. For example, the target cell may be very rare in the sample and comprise only 0.01% of the sample or the entire sample (i.e., 100%) may comprise the target cell of interest. Accordingly, any cell number is within the context of the present invention. In some embodiments, it may be desirable to significantly decrease the volume in which particles and cells are mixed together (i.e., increase the concentration of cells), to ensure maximum contact of cells and particles. For example, in some embodiments, a concentration of about 10 billion cells/ml, 9 billion/ml, 8 billion/ml, 7 billion/ml, 6 billion/ml, 5 billion/ml, or 2 billion cells/ml is used. In some embodiments, greater than 100 million cells/ml is used. In some embodiments, a concentration of cells of 10, 15, 20, 25, 30, 35, 40, 45, or 50 million cells/ml is used. In some embodiments, a concentration of cells from 75, 80, 85, 90, 95, or 100 million cells/ml is used. In some embodiments, concentrations of 125 or 150 million cells/ml can be used. Using high concentrations can result in increased cell yield, cell activation, and cell expansion. Further, use of high cell concentrations allows more efficient capture of cells that may weakly express target antigens of interest, such as CD28-negative T cells. Such populations of cells may have therapeutic value and would be desirable to obtain in some embodiments. For example, using high concentration of cells allows more efficient selection of CD8+ T cells that normally have weaker CD28 expression.

[0890] In some embodiments, cells transduced with a nucleic acid encoding a CAR, for example, a CAR described herein, for example, a CD 19 CAR described herein, are expanded, for example, by a method described herein. In some embodiments, the cells are expanded in culture for a period of several hours (for example, about 2, 3, 4, 5, 6, 7, 8, 9, 10, 15, 18, 21 hours) to about 14 days (for example, 1, 2, 3, 4, 5, 6, 7, 8, 9, 10, 11, 12, 13 or 14 days). In some embodiments, the cells are expanded for a period of 4 to 9 days. In some embodiments, the cells are expanded for a period of 8 days or less, for example, 7, 6 or 5 days. In some embodiments, the cells are expanded in culture for 5 days, and the resulting cells are more potent than the same cells expanded in culture for 9 days under the same culture conditions. Potency can be defined, for example, by various T cell functions, for example proliferation, target cell killing, cytokine production, activation, migration, surface CAR expression, CAR quantitative PCR, or combinations thereof. In some embodiments, the cells, for example, a CD19 CAR cell described herein, expanded for 5 days show at least a one, two, three or fourfold increase in cells doublings upon antigen stimulation as compared to the same cells expanded in culture for 9 days under the same culture conditions. In some embodiments, the cells, for example, the cells expressing a CD19 CAR described herein, are expanded in culture for 5 days, and the resulting cells exhibit higher proinflammatory cytokine production, for example, IFN-γ and/or GM-CSF levels, as compared to the same cells expanded in culture for 9 days under the same culture conditions. In some embodiments, the cells, for example, a CD19 CAR cell described herein, expanded for 5 days show at least a one, two, three, four, five, tenfold or more increase in pg/ml of proinflammatory cytokine production, for example, IFN-γ and/or GM-CSF levels, as compared to the same cells expanded in culture for 9 days under the same culture conditions.

[0891] Several cycles of stimulation may also be desired such that culture time of T cells can be 60 days or more. Conditions appropriate for T cell culture include an appropriate media (for example, Minimal Essential Media, α-MEM, RPMI Media 1640, AIM-V, DMEM, F-12, or X-vivo 15 (Lonza), X-Vivo 20, OpTmizer, and IMDM) that may contain factors necessary for proliferation and viability, including serum (for example, fetal bovine or human serum), interleukin-2 (IL-2), insulin, IFNγ, IL-4, IL-7, GM-CSF, IL-10, IL-12, IL-15, TGFβ, and TNFα or any other additives for the growth of cells known to the skilled artisan. Other additives for the growth of cells include, but are not limited to, surfactant, plasmanate, and reducing agents such as N-acetyl-cysteine and 2-mercaptoethanol. Media can include, but is not limited to RPMI 1640, AIM-V, DMEM, MEM, α-MEM, F-12, X-Vivo 15, X-Vivo 20, OpTmizer, and IMDM with added amino acids, sodium pyruvate, and vitamins, either serum-free or supplemented with an appropriate amount of serum (or plasma) or a defined set of hormones, and/or an amount of cytokine(s) sufficient for the growth and expansion of T cells. Antibiotics, for example, penicillin and streptomycin, are included only in experimental cultures, not in cultures of cells that are to be infused into a subject. The target cells are maintained under conditions necessary to support growth, for example, an appropriate temperature (for example, 37° C.) and atmosphere (for example, air plus 5% CO₂).

[0892] In some embodiments, the cells are expanded in an appropriate media (for example, media described herein) that includes one or more interleukin that result in at least a 200-fold (for example, 200-fold, 250-fold, 300-fold, 350-fold) increase in cells over a 14-day expansion period, for example, as measured by a method described herein such as flow cytometry. In some embodiments, the cells are expanded in the presence IL-15 and/or IL-7 (for example, IL-15 and IL-7).

[0893] In embodiments, methods described herein, for example, CAR-expressing cell manufacturing methods, comprise removing T regulatory cells, for example, CD25+ T cells or CD25^{high} T cells, from a cell population, for example, using an anti-CD25 antibody, or fragment thereof, or a CD25-binding ligand, IL-2. Methods of removing T regulatory cells, for example, CD25+ T cells or CD25^{high} T cells, from a cell population are described herein. In embodiments, the methods, for example, manufacturing methods, further comprise contacting a cell population (for example, a cell population in which T regulatory cells, such as CD25+ T cells or CD25^{high} T cells, have been depleted; or a cell population that has previously contacted an anti-CD25 antibody, fragment thereof, or CD25-binding ligand) with IL-15 and/or IL-7. For example, the cell population (for example, that has previously contacted an anti-CD25 antibody, fragment thereof, or CD25-binding ligand) is expanded in the presence of IL-15 and/or IL-7.

[0894] In some embodiments a CAR-expressing cell described herein is contacted with a composition comprising a interleukin-15 (IL-15) polypeptide, a interleukin-15 receptor alpha (IL-15Ra) polypeptide, or a combination of both a IL-15 polypeptide and a IL-15Ra polypeptide for example, hetIL-15, during the manufacturing of the CAR-expressing cell, for example, ex vivo. In embodiments, a CAR-expressing cell described herein is contacted with a composition comprising a IL-15 polypeptide during the manufacturing of the CAR-expressing cell, for example, ex vivo. In embodiments, a CAR-expressing cell described herein is contacted with a composition comprising a combination of both a IL-15 polypeptide and a IL-15 Ra polypeptide during the manufacturing of the CAR-expressing cell, for example, ex vivo. In embodiments, a CAR-expressing cell described herein is contacted with a composition comprising hetIL-15 during the manufacturing of the CAR-expressing cell, for example, ex vivo.

[0895] In some embodiments the CAR-expressing cell described herein is contacted with a composition comprising hetIL-15 during ex vivo expansion. In some embodiments, the CAR-expressing cell described herein is contacted with a composition comprising an IL-15 polypeptide during ex vivo expansion. In some embodiments, the CAR-expressing cell described herein is contacted with a composition comprising both an IL-15 polypeptide and an IL-15Ra polypeptide during ex vivo expansion. In some embodiments the contacting results in the survival and proliferation of a lymphocyte subpopulation, for example, CD8+ T cells.

[0896] T cells that have been exposed to varied stimulation times may exhibit different characteristics. For example, typical blood or apheresed peripheral blood mononuclear cell products have a helper T cell population (TH, CD4+) that is greater than the cytotoxic or suppressor T cell population (TC, CD8+). Ex vivo expansion of T cells by stimulating CD3 and CD28 receptors produces a population of T cells that prior to about days 8-9 consists predominately of TH cells, while after about days 8-9, the population of T cells comprises an increasingly greater population of TC cells. Accordingly, depending on the purpose of treatment, infusing a subject with a T cell population comprising predominately of TH cells may be advantageous. Similarly, if an antigen-specific subset of TC cells has been isolated it may be beneficial to expand this subset to a greater degree.

[0897] Further, in addition to CD4 and CD8 markers, other phenotypic markers vary significantly, but in large part, reproducibly during the course of the cell expansion process. Thus, such reproducibility enables the ability to tailor an activated T cell product for specific purposes.

[0898] Once a CAR described herein is constructed, various assays can be used to evaluate the activity of the molecule, such as but not limited to, the ability to expand T cells following antigen stimulation, sustain T cell expansion in the absence of re-stimulation, and anti-cancer activities in appropriate in vitro and animal models. Assays to evaluate the effects of a CAR of the present invention are described in further detail below

[0899] Western blot analysis of CAR expression in primary T cells can be used to detect the presence of monomers and dimers, for example, as described in paragraph 695 of International Application WO2015/142675, filed Mar. 13, 2015, which is herein incorporated by reference in its entirety.

[0900] In vitro expansion of CAR⁺ T cells following antigen stimulation can be measured by flow cytometry. For example, a mixture of CD4⁺ and CD8⁺ T cells are stimulated with αCD3/αCD28 aAPCs followed by transduction with lentiviral vectors expressing GFP under the control of the promoters to be analyzed. Exemplary promoters include the CMV IE gene, EF-1α, ubiquitin C, or phosphoglycerokinase (PGK) promoters. GFP fluorescence is evaluated on day 6 of culture in the CD4⁺ and/or CD8⁺ T cell subsets by flow cytometry. See, for example, Milone et al., Molecular Therapy 17(8): 1453-1464 (2009). Alternatively, a mixture of CD4⁺ and CD8⁺ T cells are stimulated with αCD3/αCD28 coated magnetic beads on day 0, and transduced with CAR on day 1 using a bicistronic lentiviral vector expressing CAR along with eGFP using a 2A ribosomal skipping sequence. Cultures are re-stimulated with either a cancer associated antigen as described herein⁺ K562 cells (K562-expressing a cancer associated antigen as described herein), wild-type K562 cells (K562 wild type) or K562 cells expressing hCD32 and 4-1BBL in the presence of antiCD3 and anti-CD28 antibody (K562-BBL-3/28). Exogenous IL-2 is added to the cultures every other day at 100 IU/ml. GFP⁺ T cells are enumerated by flow cytometry using bead-based counting. See, for example, Milone et al., Molecular Therapy 17(8): 1453-1464 (2009).

[0901] Sustained CAR⁺ T cell expansion in the absence of re-stimulation can also be measured. See, for example, Milone et al., Molecular Therapy 17(8): 1453-1464 (2009). Briefly, mean T cell volume (fl) is measured on day 8 of culture using a Coulter Multisizer III particle counter or a higher version, a Nexcelom Cellometer Vision, Millipore Scepter or other cell counters, following stimulation with αCD3/αCD28 coated magnetic beads on day 0, and transduction with the indicated CAR on day 1.

[0902] Animal models can also be used to measure a CAR-expressing cell activity, for example, as described in paragraph 698 of International Application WO2015/142675, filed Mar. 13, 2015, which is herein incorporated by reference in its entirety.

[0903] Dose dependent CAR treatment response can be evaluated, for example, as described in paragraph 699 of International Application WO2015/142675, filed Mar. 13, 2015, which is herein incorporated by reference in its entirety.

[0904] Assessment of cell proliferation and cytokine production has been previously described, as described in paragraph 700 of International Application WO2015/142675, filed Mar. 13, 2015, which is herein incorporated by reference in its entirety.

[0905] Cytotoxicity can be assessed by a standard 51Cr-release assay, for example, as described in paragraph 701 of International Application WO2015/142675, filed Mar. 13, 2015, which is herein incorporated by reference in its entirety. Alternative non-radioactive methods can be utilized as well.

[0906] Cytotoxicity can also be assessed by measuring changes in adherent cell’s electrical impedance, for example, using an xCELLigence real time cell analyzer (RTCA). In some embodiments, cytotoxicity is measured at multiple time points.

[0907] Imaging technologies can be used to evaluate specific trafficking and proliferation of CARs in tumor-bearing animal models, for example, as described in paragraph 702 of International Application WO2015/142675, filed Mar. 13, 2015, which is herein incorporated by reference in its entirety.

[0908] Other assays, including those described in the Example section herein as well as those that are known in the art can also be used to evaluate the CARs described herein.

[0909] Alternatively, or in combination to the methods disclosed herein, methods and compositions for one or more of: detection and/or quantification of CAR-expressing cells (for example, in vitro or in vivo (for example, clinical monitoring)); immune cell expansion and/or activation; and/or CAR-specific selection, that involve the use of a CAR ligand, are disclosed. In some embodiments, the CAR ligand is an antibody that binds to the CAR molecule, for example, binds to the extracellular antigen binding domain of CAR (for example, an antibody that binds to the antigen binding domain, for example, an anti-idiotypic antibody; or an antibody that binds to a constant region of the extracellular binding domain). In other embodiments, the CAR ligand is a CAR antigen molecule (for example, a CAR antigen molecule as described herein).

[0910] In some embodiments, a method for detecting and/or quantifying CAR-expressing cells is disclosed. For example, the CAR ligand can be used to detect and/or quantify CAR-expressing cells in vitro or in vivo (for example, clinical monitoring of CAR-expressing cells in a patient, or dosing a patient). The method includes:
[0911] providing the CAR ligand (optionally, a labelled CAR ligand, for example, a CAR ligand that includes a tag, a bead, a radioactive or fluorescent label);
[0912] acquiring the CAR-expressing cell (for example, acquiring a sample containing CAR-expressing cells, such as a manufacturing sample or a clinical sample);
[0913] contacting the CAR-expressing cell with the CAR ligand under conditions where binding occurs, thereby detecting the level (for example, amount) of the CAR-expressing cells present. Binding of the CAR-expressing cell with the CAR ligand can be detected using standard techniques such as FACS, ELISA and the like.

[0914] In some embodiments, a method of expanding and/or activating cells (for example, immune effector cells) is disclosed. The method includes:
[0915] providing a CAR-expressing cell (for example, a first CAR-expressing cell or a transiently expressing CAR cell);
[0916] contacting said CAR-expressing cell with a CAR ligand, for example, a CAR ligand as described herein), under conditions where immune cell expansion and/or proliferation occurs, thereby producing the activated and/or expanded cell population.

[0917] In certain embodiments, the CAR ligand is present on a substrate (for example, is immobilized or attached to a substrate, for example, a non-naturally occurring substrate). In some embodiments, the substrate is a non-cellular substrate. The non-cellular substrate can be a solid support chosen from, for example, a plate (for example, a microtiter plate), a membrane (for example, a nitrocellulose membrane), a matrix, a chip or a bead. In embodiments, the CAR ligand is present in the substrate (for example, on the substrate surface). The CAR ligand can be immobilized, attached, or associated covalently or non-covalently (for example, cross-linked) to the substrate. In some embodiments, the CAR ligand is attached (for example, covalently attached) to a bead. In the aforesaid embodiments, the immune cell population can be expanded in vitro or ex vivo. The method can further include culturing the population of immune cells in the presence of the ligand of the CAR molecule, for example, using any of the methods described herein.

[0918] In other embodiments, the method of expanding and/or activating the cells further comprises addition of a second stimulatory molecule, for example, CD28. For example, the CAR ligand and the second stimulatory molecule can be immobilized to a substrate, for example, one or more beads, thereby providing increased cell expansion and/or activation.

[0919] In some embodiments, a method for selecting or enriching for a CAR expressing cell is provided. The method includes contacting the CAR expressing cell with a CAR ligand as described herein; and selecting the cell on the basis of binding of the CAR ligand.

[0920] In yet other embodiments, a method for depleting, reducing and/or killing a CAR expressing cell is provided. The method includes contacting the CAR expressing cell with a CAR ligand as described herein; and targeting the cell on the basis of binding of the CAR ligand, thereby reducing the number, and/or killing, the CAR-expressing cell. In some embodiments, the CAR ligand is coupled to a toxic agent (for example, a toxin or a cell ablative drug). In some embodiments, the anti-idiotypic antibody can cause effector cell activity, for example, ADCC or ADC activities.

[0921] Exemplary anti-CAR antibodies that can be used in the methods disclosed herein are described, for example, in WO 2014/190273 and by Jena et al., “Chimeric Antigen Receptor (CAR)-Specific Monoclonal Antibody to Detect CD19-Specific T cells in Clinical Trials”, PLOS March 2013 8:3 e57838, the contents of which are incorporated by reference.

[0922] In some embodiments, the compositions and methods herein are optimized for a specific subset of T cells, for example, as described in US Serial No. PCT/US2015/043219 filed Jul. 31, 2015, the contents of which are incorporated herein by reference in their entirety. In some embodiments, the optimized subsets of T cells display an enhanced persistence compared to a control T cell, for example, a T cell of a different type (for example, CD8+ or CD4+) expressing the same construct.

[0923] In some embodiments, a CD4+ T cell comprises a CAR described herein, which CAR comprises an intracellular signaling domain suitable for (for example, optimized for, for example, leading to enhanced persistence in) a CD4+ T cell, for example, an ICOS domain. In some embodiments, a CD8+ T cell comprises a CAR described herein, which CAR comprises an intracellular signaling domain suitable for (for example, optimized for, for example, leading to enhanced persistence of) a CD8+ T cell, for example, a 4-1BB domain, a CD28 domain, or another costimulatory domain other than an ICOS domain. In some embodiments, the CAR described herein comprises an antigen binding domain described herein, for example, a CAR comprising an antigen binding domain.

[0924] In some embodiments, described herein is a method of treating a subject, for example, a subject having cancer. The method includes administering to said subject, an effective amount of:
[0925] 1) a CD4+ T cell comprising a CAR (the CARCD4+) comprising:
   [0926] an antigen binding domain, for example, an antigen binding domain described herein;
   [0927] a transmembrane domain; and
   [0928] an intracellular signaling domain, for example, a first costimulatory domain, for example, an ICOS domain; and
[0929] 2) a CD8+ T cell comprising a CAR (the CARCD8+) comprising:
   [0930] an antigen binding domain, for example, an antigen binding domain described herein;
   [0931] a transmembrane domain; and
   [0932] an intracellular signaling domain, for example, a second costimulatory domain, for example, a 4-1BB domain, a CD28 domain, or another costimulatory domain other than an ICOS domain;
   [0933] wherein the CARCD4+ and the CARCD8+ differ from one another.
   Optionally, the method further includes administering:
[0934] 3) a second CD8+ T cell comprising a CAR (the second CARCD8+) comprising:
   [0935] an antigen binding domain, for example, an antigen binding domain described herein;
   [0936] a transmembrane domain; and
   [0937] an intracellular signaling domain, wherein the second CARCD8+ comprises an intracellular signaling domain, for example, a costimulatory signaling domain, not present on the CARCD8+, and, optionally, does not comprise an ICOS signaling domain.

### Biopolymer Delivery Methods

[0938] In some embodiments, one or more CAR-expressing cells as disclosed herein can be administered or delivered to the subject via a biopolymer scaffold, for example, a biopolymer implant. Biopolymer scaffolds can support or enhance the delivery, expansion, and/or dispersion of the CAR-expressing cells described herein. A biopolymer scaffold comprises a biocompatible (for example, does not substantially induce an inflammatory or immune response) and/or a biodegradable polymer that can be naturally occurring or synthetic. Exemplary biopolymers are described, for example, in paragraphs 1004-1006 of International Application WO2015/142675, filed Mar. 13, 2015, which is herein incorporated by reference in its entirety.

### Pharmaceutical Compositions and Treatments

[0939] In some embodiments, the disclosure provides a method of treating a patient, comprising administering CAR-expressing cells produced as described herein, optionally in combination with one or more other therapies. In some embodiments, the disclosure provides a method of treating a patient, comprising administering a reaction mixture comprising CAR-expressing cells as described herein, optionally in combination with one or more other therapies. In some embodiments, the disclosure provides a method of shipping or receiving a reaction mixture comprising CAR-expressing cells as described herein. In some embodiments, the disclosure provides a method of treating a patient, comprising receiving a CAR-expressing cell that was produced as described herein, and further comprising administering the CAR-expressing cell to the patient, optionally in combination with one or more other therapies. In some embodiments, the disclosure provides a method of treating a patient, comprising producing a CAR-expressing cell as described herein, and further comprising administering the CAR-expressing cell to the patient, optionally in combination with one or more other therapies. The other therapy may be, for example, a cancer therapy such as chemotherapy.

[0940] In some embodiments, cells expressing a CAR described herein are administered to a subject in combination with a molecule that decreases the Treg cell population. Methods that decrease the number of (for example, deplete) Treg cells are known in the art and include, for example, CD25 depletion, cyclophosphamide administration, modulating GITR function. Without wishing to be bound by theory, it is believed that reducing the number of Treg cells in a subject prior to apheresis or prior to administration of a CAR-expressing cell described herein reduces the number of unwanted immune cells (for example, Tregs) in the tumor microenvironment and reduces the subject’s risk of relapse.

[0941] In some embodiments, a therapy described herein, for example, a CAR-expressing cell, is administered to a subject in combination with a molecule targeting GITR and/or modulating GITR functions, such as a GITR agonist and/or a GITR antibody that depletes regulatory T cells (Tregs). In embodiments, cells expressing a CAR described herein are administered to a subject in combination with cyclophosphamide. In some embodiments, the GITR binding molecules and/or molecules modulating GITR functions (for example, GITR agonist and/or Treg depleting GITR antibodies) are administered prior to the CAR-expressing cell. For example, in some embodiments, a GITR agonist can be administered prior to apheresis of the cells. In embodiments, cyclophosphamide is administered to the subject prior to administration (for example, infusion or re-infusion) of the CAR-expressing cell or prior to apheresis of the cells. In embodiments, cyclophosphamide and an anti-GITR antibody are administered to the subject prior to administration (for example, infusion or re-infusion) of the CAR-expressing cell or prior to apheresis of the cells. In some embodiments, the subject has cancer (for example, a solid cancer or a hematological cancer such as ALL or CLL). In some embodiments, the subject has CLL. In embodiments, the subject has ALL. In embodiments, the subject has a solid cancer, for example, a solid cancer described herein. Exemplary GITR agonists include, for example, GITR fusion proteins and anti-GITR antibodies (for example, bivalent anti-GITR antibodies) such as, for example, a GITR fusion protein described in U.S. Pat. No.: 6,111,090, European Patent No.: 090505B1, U.S Pat. No.: 8,586,023, PCT Publication Nos.: WO 2010/003118 and 2011/090754, or an anti-GITR antibody described, for example, in U.S. Pat. No.: 7,025,962, European Patent No.: 1947183B1, U.S. Pat. No.: 7,812,135, U.S. Pat. No.: 8,388,967, U.S. Pat. No.: 8,591,886, European Patent No.: EP 1866339, PCT Publication No.: WO 2011/028683, PCT Publication No.: WO 2013/039954, PCT Publication No.: WO2005/007190, PCT Publication No.: WO 2007/133822, PCT Publication No.: WO2005/055808, PCT Publication No.: WO 99/40196, PCT Publication No.: WO 2001/03720, PCT Publication No.: WO99/20758, PCT Publication No.: WO2006/083289, PCT Publication No.: WO 2005/115451, U.S. Pat. No.: 7,618,632, and PCT Publication No.: WO 2011/051726.

[0942] In some embodiments, a CAR expressing cell described herein is administered to a subject in combination with a GITR agonist, for example, a GITR agonist described herein. In some embodiments, the GITR agonist is administered prior to the CAR-expressing cell. For example, in some embodiments, the GITR agonist can be administered prior to apheresis of the cells. In some embodiments, the subject has CLL.

[0943] The methods described herein can further include formulating a CAR-expressing cell in a pharmaceutical composition. Pharmaceutical compositions may comprise a CAR-expressing cell, for example, a plurality of CAR-expressing cells, as described herein, in combination with one or more pharmaceutically or physiologically acceptable carriers, diluents or excipients. Such compositions may comprise buffers such as neutral buffered saline, phosphate buffered saline and the like; carbohydrates such as glucose, mannose, sucrose or dextrans, mannitol; proteins; polypeptides or amino acids such as glycine; antioxidants; chelating agents such as EDTA or glutathione; adjuvants (for example, aluminum hydroxide); and preservatives. Compositions can be formulated, for example, for intravenous administration.

[0944] In some embodiments, the pharmaceutical composition is substantially free of, for example, there are no detectable levels of a contaminant, for example, selected from the group consisting of endotoxin, mycoplasma, replication competent lentivirus (RCL), p24, VSV-G nucleic acid, HIV gag, residual anti-CD3/anti-CD28 coated beads, mouse antibodies, pooled human serum, bovine serum albumin, bovine serum, culture media components, vector packaging cell or plasmid components, a bacterium and a fungus. In some embodiments, the bacterium is at least one selected from the group consisting of Alcaligenes faecalis, Candida albicans, Escherichia coli, Haemophilus influenza, Neisseria meningitides, Pseudomonas aeruginosa, Staphylococcus aureus, Streptococcus pneumonia, and Streptococcus pyogenes group A.

[0945] When “an immunologically effective amount,” “an anti-cancer effective amount,” “a cancer-inhibiting effective amount,” or “therapeutic amount” is indicated, the precise amount of the compositions to be administered can be determined by a physician with consideration of individual differences in age, weight, tumor size, extent of infection or metastasis, and condition of the patient (subject). It can generally be stated that a pharmaceutical composition comprising the immune effector cells (for example, T cells, NK cells) described herein may be administered at a dosage of 10⁴ to 10⁹ cells/kg body weight, in some instances 10⁵ to 10⁶ cells/kg body weight, including all integer values within those ranges. T cell compositions may also be administered multiple times at these dosages. The cells can be administered by using infusion techniques that are commonly known in immunotherapy (see, for example, Rosenberg et al., New Eng. J. of Med. 319:1676, 1988).

[0946] In some embodiments, a dose of CAR cells (for example, CD19 CAR cells) comprises about 1 × 10⁶, 1.1 × 10⁶, 2 × 10⁶, 3.6 × 10⁶, 5 × 10⁶, 1 × 10⁷, 1.8 × 107, 2 × 107, 5 × 107, 1 × 10⁸, 2 × 10⁸, or 5 × 10⁸ cells/kg. In some embodiments, a dose of CAR cells (for example, CD19 CAR cells) comprises at least about 1 × 10⁶, 1.1 × 10⁶, 2 × 10⁶, 3.6 × 10⁶, 5 × 10⁶, 1 × 10⁷, 1.8 × 10⁷, 2 × 10⁷, 5 × 107, 1 × 10⁸, 2 × 10⁸, or 5 × 10⁸ cells/kg. In some embodiments, a dose of CAR cells (for example, CD19 CAR cells) comprises up to about 1 × 10⁶, 1.1 × 10⁶, 2 × 10⁶, 3.6 × 10⁶, 5 × 10⁶, 1 × 10⁷, 1.8 × 107, 2 × 10⁷, 5 × 10⁷, 1 × 10⁸, 2 × 10⁸, or 5 × 10⁸ cells/kg. In some embodiments, a dose of CAR cells (for example, CD19 CAR cells) comprises about 1.1 x 10⁶ - 1.8 × 10⁷ cells/kg. In some embodiments, a dose of CAR cells (for example, CD19 CAR cells) comprises about 1 × 10⁷, 2 × 10⁷, 5 × 10⁷, 1 × 10⁸, 2 × 10⁸, 5 × 10⁸, 1 × 10⁹, 2 × 10⁹, or 5 × 10⁹ cells. In some embodiments, a dose of CAR cells (for example, CD19 CAR cells) comprises at least about 1 × 10⁷, 2 × 10⁷, 5 × 10⁷, 1 × 10⁸, 2 × 10⁸, 5 × 10⁸, 1 × 10⁹, 2 × 10⁹, or 5 × 10⁹ cells. In some embodiments, a dose of CAR cells (for example, CD19 CAR cells) comprises up to about 1 × 10⁷, 2 × 10⁷, 5 × 10⁷, 1 × 10⁸, 2 × 10⁸, 5 × 10⁸, 1 × 10⁹, 2 × 10⁹, or 5 × 10⁹ cells.

[0947] In some embodiments, it may be desired to administer activated immune effector cells (for example, T cells, NK cells) to a subject and then subsequently redraw blood (or have an apheresis performed), activate immune effector cells (for example, T cells, NK cells) therefrom, and reinfuse the patient with these activated and expanded immune effector cells (for example, T cells, NK cells). This process can be carried out multiple times every few weeks. In some embodiments, immune effector cells (for example, T cells, NK cells) can be activated from blood draws of from 10 cc to 400 cc. In some embodiments, immune effector cells (for example, T cells, NK cells) are activated from blood draws of 20 cc, 30 cc, 40 cc, 50 cc, 60 cc, 70 cc, 80 cc, 90 cc, or 100 cc.

[0948] The administration of the subject compositions may be carried out in any convenient manner. The compositions described herein may be administered to a patient trans arterially, subcutaneously, intradermally, intratumorally, intranodally, intramedullary, intramuscularly, by intravenous (i.v.) injection, or intraperitoneally, for example, by intradermal or subcutaneous injection. The compositions of immune effector cells (for example, T cells, NK cells) may be injected directly into a tumor, lymph node, or site of infection.

### Dosage Regimen

[0949] In some embodiments, a dose of viable CAR-expressing cells (for example, viable CD19, BCMA, CD20, or CD22 CAR-expressing cells) comprises about 0.5 × 10⁶ viable CAR-expressing cells to about 1.25 × 10⁹ viable CAR-expressing cells (for example, 0.5 × 10⁶ viable CAR-expressing cells to 1.25 × 10⁹ viable CAR-expressing cells). In some embodiments, a dose of viable CAR-expressing cells (for example, viable CD19, BCMA, CD20, or CD22 CAR-expressing cells) comprises about 1 × 10⁶, about 2.5 × 10⁶, about 5 × 10⁶, about 1.25 × 10⁷, about 2.5 × 10⁷, about 5 × 107, about 5.75 × 10⁷, or about 8 × 10⁷ viable CAR-expressing cells.

### Patient Selection

[0950] In some embodiments of any of the methods of treating a subject, or composition for use disclosed herein, the subject has a cancer, for example, a hematological cancer. In some embodiments, the cancer is chosen from lymphocytic leukemia (CLL), mantle cell lymphoma (MCL), multiple myeloma, acute lymphoid leukemia (ALL), Hodgkin lymphoma, B-cell acute lymphoid leukemia (BALL), T-cell acute lymphoid leukemia (TALL), small lymphocytic leukemia (SLL), B cell prolymphocytic leukemia, blastic plasmacytoid dendritic cell neoplasm, Burkitt’s lymphoma, diffuse large B cell lymphoma (DLBCL), DLBCL associated with chronic inflammation, chronic myeloid leukemia, myeloproliferative neoplasms, follicular lymphoma, pediatric follicular lymphoma, hairy cell leukemia, small cell- or a large cell-follicular lymphoma, malignant lymphoproliferative conditions, MALT lymphoma (extranodal marginal zone lymphoma of mucosa-associated lymphoid tissue), Marginal zone lymphoma, myelodysplasia, myelodysplastic syndrome, non-Hodgkin lymphoma, plasmablastic lymphoma, plasmacytoid dendritic cell neoplasm, Waldenstrom macroglobulinemia, splenic marginal zone lymphoma, splenic lymphoma/leukemia, splenic diffuse red pulp small B-cell lymphoma, hairy cell leukemia-variant, lymphoplasmacytic lymphoma, a heavy chain disease, plasma cell myeloma, solitary plasmocytoma of bone, extraosseous plasmocytoma, nodal marginal zone lymphoma, pediatric nodal marginal zone lymphoma, primary cutaneous follicle center lymphoma, lymphomatoid granulomatosis, primary mediastinal (thymic) large B-cell lymphoma, intravascular large B-cell lymphoma, ALK+ large B-cell lymphoma, large B-cell lymphoma arising in HHV8-associated multicentric Castleman disease, primary effusion lymphoma, B-cell lymphoma, acute myeloid leukemia (AML), or unclassifiable lymphoma. In some embodiments, the cancer is a relapsed and/or refractory cancer.

[0951] In some embodiments of any of the methods of treating a subject, or composition for use disclosed herein, the subject has CLL or SLL. In some embodiments, the subject having CLL or SLL has previously been administered a BTK inhibitor therapy, for example, ibrutinib, for least 1-12 months, for example, 6 months. In some embodiments, the BTK inhibitor therapy, for example, ibrutinib therapy, is a second line therapy. In some embodiments, the subject had a partial response, or had stable disease in response to the BTK inhibitor therapy. In some embodiments, the subject did not response to the BTK inhibitor therapy. In some embodiments, the subject developed resistance, for example, developed ibrutinib resistance mutations. In some embodiments, the ibrutinib resistance mutations comprise a mutation in the gene encoding BTK and/or the gene encoding PLCg2. In some embodiments, the subject is an adult, for example, at least 18 years of age.

[0952] In some embodiments of any of the methods of treating a subject, or composition for use disclosed herein, the subject has DLBCL, for example, relapsed and/or refractory DLBCL. In some embodiments, the subject having DLBCL, for example, relapsed and/or refractory DLBCL, has previously been administered at least 2 lines of chemotherapy, for example, an anti-CD20 therapy and/or an anthracycline-based chemotherapy. In some embodiments, the subject has previously received stem cell therapy, for example, autologous stem cell therapy, and has not responded to said stem cell therapy. In some embodiments, the subject is not eligible for stem cell therapy, for example, autologous stem cell therapy. In some embodiments, the subject is an adult, for example, at least 18 years of age.

### Biomarkers for Evaluating CAR-Effectiveness

[0953] In some embodiments, disclosed herein is a method of evaluating or monitoring the effectiveness of a CAR-expressing cell therapy (for example, a CD19 or BCMA CAR therapy), in a subject (for example, a subject having a cancer, for example, a hematological cancer). The method includes acquiring a value of effectiveness to the CAR therapy, wherein said value is indicative of the effectiveness or suitability of the CAR-expressing cell therapy.

[0954] In embodiments, the value of effectiveness to the CAR therapy in a subject having CLL or SLL, comprises a measure of one, two, three, or all of the following parameters:
[0955] (i) a mutation in a gene encoding BTK in a sample (for example, an apheresis sample or a manufactured CAR-expressing cell product sample);
[0956] (ii) a mutation in a gene encoding PLCg2 in a sample (for example, an apheresis sample or a manufactured CAR-expressing cell product sample);
[0957] (iii) minimal residual disease, for example, as evaluated by the level and/or activity of CD8, CD4, CD3, CD5, CD19, CD20, CD22, CD43, CD79b, CD27, CD45RO, CD45RA, CCR7, CD95, Lag3, PD-1, Tim-3, and/or CD81; or as evaluated by immunoglobulin deep sequencing; in a sample (for example, an apheresis sample or tumor sample from the subject); or
[0958] (iv) the level or activity of one, two, three, four, five, six, seven, eight, nine, ten or all of the cytokines chosen from IFN-g, IL-2, IL-4, IL-6, IL-8, IL-10, IL-15, TNF-a, IP-10, MCP1, MIP1a, in a sample, for example, an apheresis sample from the subject.

[0959] In embodiments, the value of effectiveness to the CAR therapy in a subject having DLBCL, for example, relapsed and/or refractory DLBCL, comprises a measure of one or both the following parameters:
[0960] (i) minimal residual disease, for example, as evaluated by the level and/or activity of CD8, CD4, CD19, CD3, CD27, CD45RO, CD45RA, CCR7, CD95, Lag3, PD-1, and/or Tim-3; or as evaluated by immunoglobulin deep sequencing; in a sample (for example, an apheresis sample or tumor sample from the subject); or
[0961] (ii) the level or activity of one, two, three, four, five, six, seven, eight, nine, ten or all of the cytokines chosen from IFN-g, IL-2, IL-4, IL-6, IL-8, IL-10, IL-15, TNF-a, IP-10, MCP1, MIP1a, in a sample (for example, an apheresis sample from the subject).

[0962] In other embodiments, the value of effectiveness to the CAR therapy, further comprises a measure of one, two, three, four, five, six or more (all) of the following parameters:
[0963] (i) the level or activity of one, two, three, or more (for example, all) of resting T_{EFF} cells, resting T_{REG} cells, younger T cells (for example, naive T cells (for example, naive CD4 or CD8 T cells, naive gamma/delta T cells), or stem memory T cells (for example, stem memory CD4 or CD8 T cells, or stem memory gamma/delta T cells), or early memory T cells, or a combination thereof, in a sample (for example, an apheresis sample or a manufactured CAR-expressing cell product sample);
[0964] (ii) the level or activity of one, two, three, or more (for example, all) of activated T_{EFF} cells, activated T_{REG} cells, older T cells (for example, older CD4 or CD8 cells), or late memory T cells, or a combination thereof, in a sample (for example, an apheresis sample or a manufactured CAR-expressing cell product sample);
[0965] (iii) the level or activity of an immune cell exhaustion marker, for example, one, two or more immune checkpoint inhibitors (for example, PD-1, PD-L1, TIM-3, TIGIT and/or LAG-3) in a sample (for example, an apheresis sample or a manufactured CAR-expressing cell product sample). In some embodiments, an immune cell has an exhausted phenotype, for example, co-expresses at least two exhaustion markers, for example, co-expresses PD-1 and TIM-3. In other embodiments, an immune cell has an exhausted phenotype, for example, co-expresses at least two exhaustion markers, for example, co-expresses PD-1 and LAG-3;
[0966] (iv) the level or activity of CD27 and/or CD45RO- (for example, CD27+ CD45RO-) immune effector cells, for example, in a CD4+ or a CD8+ T cell population, in a sample (for example, an apheresis sample or a manufactured CAR-expressing cell product sample);
[0967] (v) the level or activity of one, two, three, four, five, six, seven, eight, nine, ten, eleven or all of the biomarkers chosen from CCL20, IL-17a, IL-6, PD-1, PD-L1, LAG-3, TIM-3, CD57, CD27, CD122, CD62L, KLRG1;
[0968] (vi) a cytokine level or activity (for example, quality of cytokine reportoire) in a CAR-expressing cell product sample, for example, CLL-1- expressing cell product sample; or
[0969] (vii) a transduction efficiency of a CAR-expressing cell in a manufactured CAR-expressing cell product sample.

[0970] In some embodiments of any of the methods disclosed herein, the CAR-expressing cell therapy comprises a plurality (for example, a population) of CAR-expressing immune effector cells, for example, a plurality (for example, a population) of T cells or NK cells, or a combination thereof. In some embodiments, the CAR-expressing cell therapy is a CD19 CAR therapy.

[0971] In some embodiments of any of the methods disclosed herein, the measure of one or more of the parameters disclosed herein is obtained from an apheresis sample acquired from the subject. The apheresis sample can be evaluated prior to infusion or re-infusion.

[0972] In some embodiments of any of the methods disclosed herein, the measure of one or more of the parameters disclosed herein is obtained from a tumor sample acquired from the subject.

[0973] In some embodiments of any of the methods disclosed herein, the measure of one or more of the parameters disclosed herein is obtained from a manufactured CAR-expressing cell product sample, for example, CD19 CAR- expressing cell product sample. The manufactured CAR-expressing cell product can be evaluated prior to infusion or re-infusion.

[0974] In some embodiments of any of the methods disclosed herein, the subject is evaluated prior to receiving, during, or after receiving, the CAR-expressing cell therapy.

[0975] In some embodiments of any of the methods disclosed herein, the measure of one or more of the parameters disclosed herein evaluates a profile for one or more of gene expression, flow cytometry or protein expression.

[0976] In some embodiments of any of the methods disclosed herein, the method further comprises identifying the subject as a responder, a non-responder, a relapser or a non-relapser, based on a measure of one or more of the parameters disclosed herein.

[0977] In some embodiments of any of the methods disclosed herein, a responder, for example, complete responder has, or is identified as having, a greater, for example, a statistically significant greater, percentage of CD8+ T cells compared to a reference value, for example, a non-responder percentage of CD8+ T cells.

[0978] In some embodiments of any of the methods disclosed herein, a responder, for example, complete responder has, or is identified as having, a greater percentage of CD27+ CD45RO-immune effector cells, for example, in the CD8+ population, compared to a reference value, for example, a non-responder number of CD27+ CD45RO- immune effector cells.

[0979] In some embodiments of any of the methods disclosed herein, a responder, for example, complete responder or a partial responder has, or is identified as having, a greater, for example, a statistically significant greater, percentage of CD4+ T cells compared to a reference value, for example, a non-responder percentage of CD4+ T cells.

[0980] In some embodiments of any of the methods disclosed herein, a responder, for example, complete responder has, or is identified as having, a greater percentage of one, two, three, or more (for example, all) of resting T_{EFF} cells, resting T_{REG} cells, younger T cells, or early memory T cells, or a combination thereof, compared to a reference value, for example, a non-responder number of resting T_{EFF} cells, resting T_{REG} cells, younger T cells, or early memory T cells.

[0981] In some embodiments of any of the methods disclosed herein, a non-responder has, or is identified as having, a greater percentage of one, two, three, or more (for example, all) of activated T_{EFF} cells, activated T_{REG} cells, older T cells (for example, older CD4 or CD8 cells), or late memory T cells, or a combination thereof, compared to a reference value, for example, a responder number of activated T_{EFF} cells, activated T_{REG} cells, older T cells (for example, older CD4 or CD8 cells), or late memory T cells.

[0982] In some embodiments of any of the methods disclosed herein, a non-responder has, or is identified as having, a greater percentage of an immune cell exhaustion marker, for example, one, two or more immune checkpoint inhibitors (for example, PD-1, PD-L1, TIM-3, TIGIT, and/or LAG-3). In some embodiments, a non-responder has, or is identified as having, a greater percentage of PD-1, PD-L1, or LAG-3 expressing immune effector cells (for example, CD4+ T cells and/or CD8+ T cells) (for example, CAR-expressing CD4+ cells and/or CD8+ T cells) compared to the percentage of PD-1 or LAG-3 expressing immune effector cells from a responder.

[0983] In some embodiments, a non-responder has, or is identified as having, a greater percentage of immune cells having an exhausted phenotype, for example, immune cells that co-express at least two exhaustion markers, for example, co-expresses PD-1, PD-L1 and/or TIM-3. In other embodiments, a non-responder has, or is identified as having, a greater percentage of immune cells having an exhausted phenotype, for example, immune cells that co-express at least two exhaustion markers, for example, co-expresses PD-1 and LAG-3.

[0984] In some embodiments of any of the methods disclosed herein, a non-responder has, or is identified as having, a greater percentage of PD-1/ PD-L1+/LAG-3+ cells in the CAR-expressing cell population (for example, a CLL-1 CAR+ cell population) compared to a responder (for example, a complete responder) to the CAR-expressing cell therapy.

[0985] In some embodiments of any of the methods disclosed herein, the responder (for example, the complete or partial responder) has one, two, three or more (or all) of the following profile:
[0986] (i) has a greater number of CD27+ immune effector cells compared to a reference value, for example, a non-responder number of CD27+ immune effector cells;
[0987] (ii) has a greater number of CD8+ T cells compared to a reference value, for example, a non-responder number of CD8+ T cells;
[0988] (iii) has a lower number of immune cells expressing one or more checkpoint inhibitors, for example, a checkpoint inhibitor chosen from PD-1, PD-L1, LAG-3, TIM-3, or KLRG-1, or a combination, compared to a reference value, for example, a non-responder number of cells expressing one or more checkpoint inhibitors; or
[0989] (iv) has a greater number of one, two, three, four or more (all) of resting T_{EFF} cells, resting T_{REG} cells, naive CD4 cells, unstimulated memory cells or early memory T cells, or a combination thereof, compared to a reference value, for example, a non-responder number of resting T_{EFF} cells, resting T_{REG} cells, naive CD4 cells, unstimulated memory cells or early memory T cells.

[0990] In embodiments, a subject who is a responder, a non-responder, a relapser or a non-relapser identified by the methods herein can be further evaluated according to clinical criteria. For example, a complete responder has, or is identified as, a subject having a disease, for example, a cancer, who exhibits a complete response, for example, a complete remission, to a treatment. A complete response may be identified, for example, using the NCCN Guidelines®, or the International Workshop on Chronic Lymphocytic Leukemia (iwCLL) 2018 guidelines as disclosed in Hallek M et al., Blood (2018) 131:2745-2760 “iwCLL guidelines for diagnosis, indications for treatment, response assessment, and supportive management of CLL,” the entire contents of which are hereby incorporated by reference in its entirety. A partial responder has, or is identified as, a subject having a disease, for example, a cancer, who exhibits a partial response, for example, a partial remission, to a treatment. A partial response may be identified, for example, using the NCCN Guidelines®, or iwCLL 2018 criteria as described herein. A non-responder has, or is identified as, a subject having a disease, for example, a cancer, who does not exhibit a response to a treatment, for example, the patient has stable disease or progressive disease. A non-responder may be identified, for example, using the NCCN Guidelines®, or iwCLL 2018 criteria as described herein.

[0991] Alternatively, or in combination with the methods disclosed herein, responsive to said value, performing one, two, three four or more of:
[0992] administering for example, to a responder or a non-relapser, a CAR-expressing cell therapy;
[0993] administered an altered dosing of a CAR-expressing cell therapy;
[0994] altering the schedule or time course of a CAR-expressing cell therapy;
[0995] administering, for example, to a non-responder or a partial responder, an additional agent in combination with a CAR-expressing cell therapy, for example, a checkpoint inhibitor, for example, a checkpoint inhibitor described herein;
[0996] administering to a non-responder or partial responder a therapy that increases the number of younger T cells in the subject prior to treatment with a CAR-expressing cell therapy;
[0997] modifying a manufacturing process of a CAR-expressing cell therapy, for example, enriching for younger T cells prior to introducing a nucleic acid encoding a CAR, or increasing the transduction efficiency, for example, for a subject identified as a non-responder or a partial responder;
[0998] administering an alternative therapy, for example, for a non-responder or partial responder or relapser; or
[0999] if the subject is, or is identified as, a non-responder or a relapser, decreasing the T_{REG} cell population and/or T_{REG} gene signature, for example, by one or more of CD25 depletion, administration of cyclophosphamide, anti-GITR antibody, or a combination thereof.

### EXAMPLES

[1000] The invention is further described in detail by reference to the following experimental examples. These examples are provided for purposes of illustration only, and are not intended to be limiting unless otherwise specified. Thus, the invention should in no way be construed as being limited to the following examples, but rather, should be construed to encompass any and all variations which become evident as a result of the teaching provided herein.

### Example 1 Generation of CARTs With Cytokine Stimulation

### Summary

[1001] This example describes a CART manufacturing process called “cytokine process.” In some embodiments, cells (for example, T cells) are seeded in media (for example, serum-containing media, for example, media containing 2% serum). One or more cytokines (for example, one or more cytokines chosen from IL-2, IL-7, IL-15 (for example, hetIL-15 (IL15/sIL-15Ra)), IL-21, or IL-6 (for example, IL-6/sIL-6Ra) as well as vectors (for example, lentiviral vectors) encoding a CAR are added to the cells. After incubation for 20-24 hours, cells are washed, formulated, and cryopreserved. Exemplary cytokine process is shown in FIG. 1A.

[1002] Compared to the traditional CART manufacturing process, this revised process eliminates CD3/CD28 stimulation as well as ex vivo T cell expansion. Without wishing to be bound by theory, anti-CD3/anti-CD28 beads drive differentiation into central memory cells; and in contrast, cytokines such as IL-15, IL-21, and IL-7 may help preserve the undifferentiated phenotype of transduced CD3+ T cells. As a consequence, the cytokine process which does not involve CD3/CD28 activation may generate CART cells with a higher percentage of naive/stem T cells, compared to CART cells generated using the traditional approach.

### Methods

[1003] After obtaining an apheresis within 24 hours of collection, T cells were purified and the purity of the T-cells obtained was assessed by flow cytometry. The T cells were frozen and placed in the liquid nitrogen until required for use.

[1004] Alternatively, a cryopreserved apheresis sample is prepared and enriched for CD4+ T cells and/or CD8+ T cells using a Prodigy® machine.

[1005] IL-7 and IL-15 were prepared at 1,000 folds of the final concentration required. IL-2 was prepared by a 10-fold dilution in media.

TABLE 19

Cytokine conditions

| | Conditions |
|---|---|
| 1. | IL2 |
| 2. | IL-7 |
| 3. | IL-15 |
| 4. | IL2+IL7 |
| 5. | IL-7+IL-15 |
| 6. | IL2+IL-15 |
| 7. | Beads +IL2 |
| 8. | Beads +IL15 |

[1006] In the expander bead stimulated conditions, calculations were performed to plate cells with a final concentration of bead to cell ratio of 3:1. The Dynabeads® magnetic beads were washed twice using a Dynamag® and resuspended in the required volume of media for the experiment. The washed beads were added to the tubes that contained the specific cytokines and cells.

[1007] At the time of plating, the cells were transduced with a lentiviral vector with a multiplicity of infection (MOI) of 1. The specific volume of vector to be transduced was calculated based on the multiplicity of infection (MOI) and concentration (titer) of the vector lot in use. The titer and the MOI were measured based on primary T cell lines.

[1008] In the conditions where cytokines alone were utilized for stimulation, the cells were resuspended post wash at a concentration of 1E7/ml and added to a conical tube that already contained the cytokines depending on the condition (Table 19). After the cells and cytokines were added the lentiviral vector was added followed by the media.

[1009] In all of the conditions the cells were mixed and 1ml was plated in 14 wells of a 24 well plate. The cells were placed in an incubator that was at 37° C. and 5% CO₂.

[1010] On the following day the cells were harvested, the concentration and viability of the cells was noted. Their function was measured using a cytotoxicity and proliferation (EDU) incorporation assay. These cells were referred to as “day 1 CARTs.”

[1011] The cells were immunophenotyped for T cell differentiation status and transduction of the CAR was assessed using flow cytometry. The cells were washed, viability dye was added followed by the antibody cocktail (Table 20), and the plates were incubated for 20 minutes at room temperature. After the incubation, the cells were washed twice and fixed prior to being analyzed on the BD fortessa.

TABLE 20

Antigens of the panel of antibodies used to determine the differentiation status of the T-cells
Antigen
Viability
CD3
CD4
CD8
HLADR
CD28
CD45RO
CD95
CCR7
Anti-Idiotype

[1012] To determine if the day 1 CARTs still maintained the ability to expand post-harvest, 5e6 cells/condition were expanded using CD3/CD28 beads in a T25 flask at a ratio of 3:1 (beads to cells). The Dynabeads® magnetic beads were washed as previously described. The media contained no cytokines. The cells were placed in an incubator that was at 37° C. and 5% CO₂.

[1013] In the case of the T cells expanded with the CD3/CD28 beads every 2 days, the cells were counted and spilt up to 10 days in culture. On day 10 the cells were harvested, counted, immunophenotyped using the differentiation panel (Table 20) and frozen in Cryostor 10™. The cells were thawed for functional assays that included cytotoxicity assay, proliferation assay and cytokine secretion assay.

[1014] The cells expanded in the presence of CD3/CD28 beads in vitro for 10 days were referred to as “day 10 CARTs.”

### Results

[1015] When purified T cells were incubated with cytokines in the absence of any other activation stimulus, there was an increase in transduction from day 1 to day 4 (FIG. 1B). Independent of the time point and cytokine condition, the predominant population within the CAR positive population was naive (FIGS. 1D, 1E, and 1F). The elimination of the activation agent led to an enhancement of transduction with the primitive population. Notably, exposure to IL-2 or IL-15 maintained self-renewing T cells in vitro (FIG. 1G). Similar phenomenon was observed under the other cytokine treatments tested (IL-7; IL2+IL7; IL-7+IL-15; and IL2+IL-15) (data not shown). The cytokine process (using IL2 or IL-15 in this specific example) maintained or slightly increased the percentage of CD45RO-CCR7+ cells (FIG. 1G). Similar data are shown in FIGS. 1H and 1I for IL-2, IL-15, and a combination of IL-7 and IL-15. Culturing T cells with the indicated cytokines for 24 hours maintained the naive phenotype of CD3+ T cells, and reduced the percentage of central memory T cells (FIGS. 1H and 1I).

[1016] To ensure that the transduction observed within 24 hours was stable, the CARTs generated within 24 hours were washed to remove any residual virus and expanded over 10 days using CD3/D28 expansion beads. The expanded cells demonstrated almost equivalent transduction to the day 1 CARTs indicating that the transduction was stable (FIG. 2A).

[1017] The functionality of the day 1 CARTs and day 10 CARTs was tested using a cytotoxicity, a cytokine release, and a proliferation assay. The target cells were Nalm6 cells, a B cell ALL cell line that expresses CD19. The cytotoxicity assay demonstrated that the day 1 CARTs post expansion were equivalent at killing as compared to the day 10 CARTs (FIG. 2B) even though the day 1 CARTs had much fewer transduced cells. The same day 1 CARTs that had been expanded were compared for the secretion for IFN-gamma and found to have a lower secretion of IFN-gamma as compared to the day 10 CARTs (FIG. 2C), which was likely due to the difference in the number of transduced cells. In separate studies where the day 1 CARTs had a higher level of transduction, they secreted a higher level of IFN-gamma (data not shown). Furthermore, the day 1 CARTs from all the treatment conditions except the IL7-only condition showed similar or higher proliferation than the day 10 CARTs (FIG. 2D). The data shown in FIG. 2D were not normalized for transduction levels.

[1018] Although stable transduction was observed in the day 10 CARTs, the efficiency was consistently low. A titration of increasing multiplicity of infection (MOI) of the lentiviral vector was tested in four cytokine conditions and in all conditions tested a linear relationship with transduction was observed (FIG. 3A).

[1019] Furthermore, different media compositions (mainly a reduction in serum concentration from 5% to 2% to serum free) were compared to determine whether they impact the transduction efficiency. The reduction in serum to 2% human serum led to the highest transduction efficiency (FIG. 3B). The addition of Glutamax alone was also considered to have a significant impact on transduction efficiency.

[1020] Next, the day 1 CARTs and day 10 CARTs were examined for their anti-tumor activity in vivo using a mouse ALL model. Briefly, day 1 CARTs and day 10 CARTs were manufactured as described above with a viability above 80% (FIGS. 4A and 4B). CARTs were administered in tumor-bearing mice and monitored for expansion in vivo. As shown in FIG. 4C, day 1 CARTs showed a higher level of in vivo expansion than their day 10 counterparts. In particular, CARTs manufactured in the presence of IL-2 showed the highest level of in vivo expansion (FIG. 4C). All the CARTs tested inhibited tumor growth in vivo, although day 1 CARTs showed a delayed kinetics as compared to the day 10 CARTs (FIG. 4D). In this specific donor, the IL2 condition demonstrated the greatest ability to eliminate the tumor in vivo (FIG. 4D).

[1021] Furthermore, it was tested whether this manufacturing process was scalable. Purified T cells from a frozen apheresis sample were transduced with an anti-CD19 CAR in either a 24 well plate or a PL30 bag post enrichment, in the presence of either IL2 or hetIL-15 (IL15/sIL-15Ra). hetIL-15 has been described in WO 2014/066527, herein incorporated by reference in its entirety, and comprises human IL-15 complexed with a soluble form of human IL-15Ra. Cells were harvested 24 hours later and tested for expression of CAR. As shown in FIG. 5B, there was no impact on transduction observed when the process was scaled from a 24 well plate to a PL30 bag in the presence of either IL2 or hetIL-15.

### Example 2 Generation of CARTs With TCR Stimulation

### Summary

[1022] This example describes a CART manufacturing process called “activation process.” In some embodiments, cells (for example, T cells) are seeded in media (for example, serum-free media, for example, OpTmizer™ media) containing IL-2 (for example, OpTmizer™ media containing OpTmizer™ supplement, GlutaMAX and 100 IU/ml of IL-2), placed in a cell culture device, and contacted with anti-CD3/anti-CD28 (for example, TransAct). After 12 hours, a vector (for example, a lentiviral vector) encoding a CAR is added to the cells and the cells are returned to an incubator. At 24 hours from initiation of the cell culture, the cells are harvested, sampled, and formulated. Without wishing to be bound by theory, brief CD3 and CD28 activation, for example, using anti-CD3/anti-CD28 (for example, TransAct), promotes efficient transduction of self-renewing T cells.

[1023] In this and other examples, a CART manufacturing process called “traditional manufacturing (TM)” process was used as a control. In some embodiments, T cells are selected from a fresh or cryopreserved leukapheresis sample (for example, using positive or negative selection), activated (for example, using anti-CD3/anti-CD28 antibody coated Dynabeads®), contacted with a nucleic acid molecule encoding a CAR molecule (for example, transduced with a lentiviral vector comprising a nucleic acid molecule encoding the CAR molecule), and expanded in vitro for, for example, 7, 8, 9, 10, or 11 days. An exemplary TM process is provided in this example as the methods used to manufacture CAR cells from the d9 control arms.

### Methods

[1024] In some embodiments, the activation process provided herein starts with a frozen or fresh leukapheresis product. After a sample for counting and QC is obtained, the product is attached to a cell sorting machine (for example, an installed CliniMACS® Prodigy® device kit) and the program begins. The cells are washed and incubated with microbeads that bind to desired surface marker or markers (such as CD3, CD4, CD8, CD27, CD28, CD45RO, CCR7, CD62L, CD14, CD34, CD95, CD19, CD20, CD22, and/or CD56). The bead-labeled cells are selected by passing the cells through a magnetic column. If desired, cells can be further separated by incubating the negative fraction with beads that bind to a second set of surface markers (such as CD3, CD4, CD8, CD27, CD28, CD45RO, CCR7, CD62L, CD14, CD34, CD95, CD19, CD20, CD22, and/or CD56) and again passing the cells through a magnetic separation column. Isolated cells are washed again and the separation buffer is exchanged for cell media. Purified cells then either proceed to culture or are cryopreserved for later use. Cryopreserved cells can be thawed, washed in pre-warmed cell media, and resuspended in cell media. Fresh cells can be added to culture directly. The cells are seeded into membrane bioreactors at 0.4-1.2e6 cells/cm² of membrane, an activating reagent such as anti-CD3/anti-CD28 beads/polymers, nanoparticles, or nanocolloids (and/or any of the following co-activators alone or in combination: a reagent that stimulates ICOS, CD27, HVEM, LIGHT, CD40, 4-1BB, OX40, DR3, GITR, CD30, TIM1, CD2, or CD226) is added, and cell media is added to a final volume of 0.25-2 ml/cm² of membrane. A vector (for example, a lentiviral vector) encoding the CAR is added immediately or up to 18 hours after culture initiation. The cells are incubated with the vector and the activating reagent described above for a total of 24 hours post culture initiation. Once culture has proceeded for 24 hours, the cells are resuspended mechanically by swirling or pipetting or otherwise agitating, and simulating reagent scaffolds are dissolved with appropriate buffers. The cells are washed to remove unnecessary reagents and reformulated in cryopreservation media. The cells are cryopreserved until needed for administration.

[1025] For studies related to FIGS. 6A-6C, the following protocol was used.

[1026] Cells were purified from a fresh ¼ leukopack using automated ficoll (Sepax 2, BioSafe) to generate peripheral blood mononuclear cells (PBMC). These PBMCs were further purified using immunomagnetic negative selection (PanT Negative Selection Kit, Miltenyi) to generate CD3 T-cells of high purity (98-100%). These cells were placed in culture with OpTmizer™ (Thermo) complete media (formulated per package insert and supplemented with IL-2 at 100IU/ml (Proleukin, Prometheus)) and an anti-CD3/CD28 activation reagent at the recommended dose (TransAct, Milenyi) in a membrane bioreactor. Cells were then incubated at 37° C., 5% CO₂ for 12 hours for activation. Cells were removed from the incubator and freshly thawed lentiviral vector was added to the cultures at a multiplicity of infection (MOI) of 2.5 tu/cell. Cells were returned to the incubator for another 12 hours for transduction. Cells were harvested, washed twice with media, and formulated directly into sterile PBS (Invitrogen) and injected into NSG mice via the tail vein. Cells from the d9 control arms were grown in flasks (T25-T225, Corning) using RPMI media (Thermo) supplemented with 10% fetal bovine serum (Seradigm) (complete media a.k.a “R10”) and anti CD3/28 Expander Dynabeads® (Thermo) at 3 beads per T-cell. Cells were then incubated at 37° C., 5% CO₂ for 24 hours for activation. Cells were removed from the incubator and freshly thawed lentiviral vector was added to the cultures at a MOI of 2.5 tu/cell. Cells were returned to the incubator for an additional 7 days, splitting every 2 days to maintain a concentration of 5e5 cells/ml. Expanded cells were transferred to 50 ml centrifuge tubes (Corning) and subjected to two rounds of bead removal using a standing magnet (Dynamag-50, Thermo). Debeaded cells were then washed twice with media, and formulated into CryoStor10 cryomedia (STEMCELL Technologies), cryopreserved using a CoolCell device (BioCision), and kept in vapor phase liquid nitrogen for a minimum of 48 hours. Cells were thawed into prewarmed R10 media, washed twice with media, then formulated into sterile PBS (Invitrogen) and injected into NSG mice via the tail vein.

[1027] 6-8 week old NSG mice (NOD.Cg-PrkdcscidIl2rgtm1Wjl/SzJl, Jackson Labs) were injected with luciferized NALM6 tumor cells (ATCC CRL-3273, ATCC) at 1e6 cells/mouse 4 day prior to CART injection without preconditioning. PBS formulated CART cells were injected at 2e6, 5e5, or 2e5 CAR+ cells per NSG or a matched dose of untransduced expanded T-cells or a PBS vehicle control. Mice were monitored by weekly blood draw, bi-weekly luciferase imaging (Xenogen IVIS, PerkinElmer), and bi-weekly weight measurements. All animals were monitored for signs of toxicity (weight loss, moribund) and euthanized if symptomatic. All surviving mice were euthanized at study termination (week 5) and terminal blood, bone marrow, and spleen samples were obtained. Study was performed according to IACUC and all other applicable guidelines.

### Results

[1028] CART cells were generated using the activation process described above and characterized for their in vivo anti-tumor activity in a mouse ALL model. As shown in FIGS. 6A-6C, CART cells manufactured using the activation process showed strong anti-tumor activity in vivo.

### Example 3 IL6R Expression on T Cells and Cytokine Effect on T Cell Expansion Material and Methods

### T Cell Culture

[1029] Previously frozen T cells were thawed and contacted with αCD3/αCD28 dynal beads (cell to bead ratio of 1 to 3) in the presence of indicated cytokines at day 0. From day 3, twice more T cell growth media (RPMI1640, 10% FBS, 2 mM L-glutamin, 100 µM non-essential amino acids, 1 mM sodium pyruvate, 10 mM Hepes, 55 µM β-mercaptoethanol, 10% FBS, and 100 U/ml of penicillin-streptomycin) was added to the plate with indicated cytokines (without cytokine, rhIL2 (50 IU/ml, Novartis), IL6 (10 ng/ml, R&D systems), IL7 (10 ng/ml, Peprotech), IL15 (10 ng/ml, Peprotech), and IL21 (10 ng/ml, Peprotech)) at day 3, 5, 6, 9, 12, 15, and 18. Cells treated without cytokine, IL6, or IL21 were cultured until day 18 and cells treated with IL2, IL7, or IL15 were cultured until day 25.

### Cell Surface Staining

[1030] Cells were harvested at indicated time points and then stained with live/dead dye (eFluro780, eBioscience), CD3 (BioLegend, clone#: OKT3), CD4 (BioLegend, clone#: OKT4), CD8 (BD Bioscience, clone#: RPA-T8), CD45RO (BioLegend, clone#: UCHL1), CCR7 (BioLegend, clone#: G043H7), CD27 (BD Horizon, clone#: L128), CD127 (BioLegend, clone#: A019D5), CD57 (BioLegend, clone#: HCD57), CD126 (BioLegend, clon#: UV4), and CD130 (R&D Systems, clone#: 28126) antibodies. The cells were acquired by FACS Fortessa and then FlowJo program was used for data analysis.

### Intracellular Cytokine Staining

[1031] To examine percent of cytokine producing cells, at day 25, T cells were harvested and then briefly activated with PMA (50 ng/ml, Sigma-Aldrich) and Ionomycin (1 µM, Sigma-Aldrich) for 4 hours in the presence of Brefeldin A (BioLegend) at 37° C. incubator. T cells were then stained with live/dead dye (eFluro780, eBioscience), CD3 (BioLegend, clone#: OKT3), CD4 (BioLegend, clone#: OKT4), CD8 (BD Bioscience, clone#: RPA-T8) antibodies followed by fixation and permeabilization. Then, T cells were further stained with antibodies against IFN-γ (BioLegend, clone#: 4S.B3), IL-2 (BioLegend, MQ1-17H12), and TNF-a (BioLegend, Mab11). The cells were acquired by FACS Fortessa and then FlowJo program was used for data analysis.

### Results

[1032] IL6Rα and/ or IL6Rβ expressing cells were enriched in less differentiated T cell subsets in both CD4 and CD8 T cells. As shown in FIGS. 7A and 7B, naive CD4 and CD8 T cells expressed higher levels of IL6Rα and IL6Rβ than the corresponding memory T cells. T cells that expressed both IL6Rα and IL6Rβ were predominantly CD45RA+CD45RO-CD27+CD28+ cells (FIGS. 8A and 8B). Upon TCR stimulation, IL6Rα but not IL6Rβ expression was downregulated (FIG. 11).

[1033] Next, different cytokines were compared for their impact on T cell expansion. Among the cytokines tested, IL15, IL2, and IL7 enhanced T cell expansion, with IL15 showing the greatest enhancement (FIG. 12). Cytokine treatment did not affect cell size (FIG. 13A) or viability (FIG. 13B). IL15 treatment also enhanced expansion of IL6Rβ expressing cells (FIG. 14). IL6Rβ expressing cells were mainly in the CD27+ (FIG. 16) or CD57- (FIG. 17) T cell subsets in both CD4 and CD8 at day 15 after TCR engagement and produced IL2, IFNγ, and TNFα cytokines at day 25 after TCR activation (FIG. 18).

### Example 4 Generation of CARTs With TCR Stimulation for Preclinical Studies

[1034] Day 0 unit operations of the engineering runs for preclinical studies began with the manufacturing of the media used on Day 0: Rapid Buffer and Rapid Media (Table 21). The Rapid Buffer (RB) contains the CliniMACS® buffer (Miltenyi) with 0.5% HSA. The Rapid Media (Table 21) was formulated on Day 0 of manufacturing and the base media contains the off-the-shelf media called OpTmizer™ which has Glutamax, IL-2, CTS™ supplement, and ICSR . The Prodigy® machine was primed for use on Day 0.

TABLE 21

Media type and point of use during CART manufacturing

| | | |
|---|---|---|
| Media/Buffer Type | Composition | Point of Use |
| Rapid Buffer (RB) | CliniMACS® Buffer (+0.5% human serum albumin (HSA)) | Day 0 Processing on Cell Wash/Separator |
| Rapid Media (RM) | OpTmizer™ Media, CTS™, IL-2, Glutamax and ICSR | Day 0 for Processing on Cell Wash/Separator and Cell Seeding |
| Harvest Buffer (HB) (also called Harvest Buffer Solution) | PBS no EDTA and 2% HSA | Harvest Wash Buffer (Day 1) |
| Cryomedia | Cryostor10 (CS10) | Harvest Formulation |

[1035] As the Prodigy® machine was priming on Day 0, the healthy donor leukapheresis material was thawed and the apheresis material was combined into a 600-mL transfer bag that can later be welded onto the Prodigy®. An IPC sample was extracted from the 600 mL transfer bag and measured by NC200 to obtain both the viable cell count and the viability percentage for the starting apheresis material. After priming of the Prodigy® was finished, the apheresis material was transferred to the application bag. After the apheresis entered the Prodigy® machine after initiation of the TCT program, the program ran from 3 h 45 min to 4 h 15 min depending on how many positive selection separations it performed. The TCT program on Day 0 washed out the DMSO in the Centricult with the Rapid Buffer, performed a platelet wash, volume reduction, incubation of the apheresis with the CD4 and CD8 Microbeads in the Centricult, and then selection of the T cells with the Microbeads via positive selection using the magnet on the Prodigy®. The T cells selected with the CD4 and CD8 reagents were eluted into the reapplication bag with the Rapid Media. An in-process control (IPC) sample was taken from the reapplication bag to determine the total viable cell number available for seeding in the culture vessel (G-Rex500MCS).

[1036] The G-Rex culture device was first primed with the Rapid Media and then the target cell volume from the reapplication bag was added to the culture vessel. The activation reagent (TransACT) was then added to the culture vessel. The lentiviral vector was then added to the culture vessel after the introduction of TransACT and the vector addition was performed using a MOI of 1.0. The G-Rex500MCS culture vessel was then flushed with the Rapid Media to a final media volume of 250 mL plus the volume of the vector addition. The G-Rex culture vessel was then placed into the incubator to allow the culture to incubate for a target 24 h with a range of 20 - 28 hours.

[1037] After the target 24 h incubation, the CART culture was taken out of the incubator and a sample was extracted to obtain the viable cell count and viability of the cell culture before the Harvest Wash. The sample take at Pre-Harvest was an IPC and was used as an input into the LOVO wash device to determine the flow rate of cells into the spinning filtration membrane. The LOVO used the viable WBC concentration as the IPC. The program used for the CART manufacturing process was described as 4 Washes with one solution and utilized the Harvest Buffer (PBS + 2.0% HSA). During the LOVO wash, the IPC bag was used to both reduce the volume and wash the cells with Harvest Buffer before it was finally eluted into the output bag. The output bag from the LOVO wash was then sampled to obtain the viable cell count and viability in order to perform the manual centrifugation with the sanisure bottle and to perform the final steps of the final formulation with the cryomedia.

### Example 5 Generation of BCMA CARTs Using the Activated Rapid Manufacturing (ARM) Process

### Summary

[1038] This example describes a CART manufacturing process called “activated rapid manufacturing (ARM).” In some embodiments, cells (for example, T cells) are cultured in a cell culture device containing media (for example, serum-free media, for example, OpTmizer™ media), recombinant human IL-2 (for example, OpTmizer™ media containing OpTmizer™ supplement, GlutaMAX and 100 IU/ml of IL-2), anti-CD3/anti-CD28 (for example, TransAct) and a vector (for example, a lentiviral vector) encoding a BCMA CAR. After 24 hours, the cells, referred as “day 1 CART product” are harvested, sampled, and formulated. Without wishing to be bound by theory, brief CD3 and CD28 activation, for example, using anti-CD3/anti-CD28 (for example, TransAct), promotes efficient transduction of self-renewing T cells. In some cases, some cells are harvested at 48 h, 72 h, and 96 h or 7 days after culture for measuring BCMA CAR expression kinetics in vitro. The day 1 CART responses include, but are not limited to, in vivo cytolytic activity and expansion.

### Generation of Day 1 BCMA CARTs Using the ARM Process

[1039] In some embodiments, the activation process provided herein starts with a frozen or fresh leukapheresis product. After a sample for counting and QC is obtained, the product is attached to a cell sorting machine (for example, an installed CliniMACS® Prodigy® device kit) and the program begins. The cells are washed and incubated with microbeads that bind to desired surface markers, such as CD4 and CD8. The bead-labeled cells are selected by passing the cells through a magnetic column. Isolated cells are washed again and the separation buffer is exchanged for cell media. Purified T cells then either proceed to culture or are cryopreserved for later use. Purity of the isolated T cells will pass a QC step by flow cytometry assessment. Cryopreserved cells can be thawed, washed in pre-warmed cell media, and resuspended in cell media. Fresh cells can be added to culture directly. The cells are seeded into membrane bioreactors at 0.4-1.2e⁶ cells/cm² of membrane, an activating reagent, such as anti-CD3/anti-CD28 beads/polymers, nanoparticles, or nanocolloids, is added, and cell media is added to a final volume of 0.25-2 ml/cm² of membrane. At the time of plating, the cells are transduced with a lentiviral vector encoding BCMA CAR at various multiplicity of infections (MOIs). The titer and the MOI are measured based on cell lines such as SupT1. At 24 hours, the cells are washed to remove unnecessary reagents before staining to measure the CAR expression by flow cytometry and reformulated in cryopreservation media as “day 1 CART product” for in vivo study.

[1040] Described in this example are the generation and characterization of T cells expressing BCMA CAR R1B6, R1F2, R1G5, PI61, B61-02, B61-10, or Hy03, manufactured using the ARM process. The sequences of R1B6, R1F2, and R1G5 are disclosed in Tables 3-6. The sequences of PI61, B61-02, and B61-10 are disclosed in Tables 7-11. The sequences of Hy03 are disclosed in Tables 12-15.

[1041] Twenty-four hours after T cells were transduced using lentiviral vectors encoding BCMA CARs at a MOI of 2.5, the expression of CAR was measured by flow cytometry using rBCMA_Fc. As shown in FIG. 19A, it was observed that the whole population of the live CD3+ T cells shifted to the right at different degrees. Cells transduced to express R1G5, R1B6 or PI61 showed the highest CAR expression (FIG. 19A). This pattern of expression as measured by flow cytometry was different from a typical flow cytometry histogram of cells transduced to express a CAR, where a CAR positive population is clearly separated from a negative population. FIG. 19A indicates that there may be “pseudotransduction or transient expression” detected by rBCMA_Fc, which does not always indicate real gene expression. It has been previously reported that lentiviral pseudotransduction was observed beginning at the time of vector addition and lasting up to 24 hours in CD34+ cells and up to 72 hours in 293 cells (Haas DL, et al. Mol Ther. 2000. 291: 71-80). Integrase-defective lentiviral vector caused transient eGFP expression for up to 10 days in CD34+ cells and for up to 14 days in 293 cells. Though lentiviral pseudotransduction has not been extensively studied in T cells, this possibility of transient expression in such a short time cannot be ruled out. Therefore, in vitro kinetic study was performed to measure CAR expression of cells manufactured using ARM as indicated below.

### In Vitro CAR Expression Kinetics Study of Cells Manufactured Using the ARM Process

[1042] The study described here examines how cells manufactured using the ARM process express CAR molecules over time. Briefly, T cells from a healthy donor were manufactured to express a BCMA CAR using the ARM process at a MOI of 1 and were kept in culture for different time periods and harvested at 24 h, 48 h, 72 h, 96 h, and day 7 for assessing CAR expression kinetics by flow cytometry using AF647 labeled rBCMA_Fc. Understanding the CAR expression kinetics helps to find a surrogate time point for real and stable expression for in vivo triage or clinical dosing strategy.

[1043] At day 1, the CAR expression pattern of cells transduced at a MOI of 1 (FIG. 20A) is similar to that of cells transduced at a MOI of 2.5 (FIG. 19A). Both MOI conditions showed a pseudo or transient expression pattern at day 1 (FIGS. 19A and 20A). However, at day 2, a rBCMA_Fc positive population started to be separated from the UTD negative control group (FIG. 20A). At day 3 and day 4, a rBCMA_Fc positive population, which represents the BCMA CAR-expressing cells and is absent in the UTD group, clearly showed up in all the groups where cells were transduced to express a BCMA CAR. From day 3 to day 4, the CAR+% was relatively stable for each CAR construct (FIG. 20B), with the highest MFI observed at day 3 (FIG. 20C) (the cells were the largest at this time point). Consistent with the data shown in FIG. 19A, cells transduced to express PI61, R1G5 and R1B6 were the highest CAR expressers (FIG. 20A). Notably, cells transduced with vectors encoding R1F2 or Hy03 did not show transient CAR expression at day 1 but clearly expressed BCMA CAR molecules later at day 3 and day 4 (FIG. 20A). In conclusion, vectors encoding different CARs may have different CAR expression kinetics over time, and day 3 was chosen as a surrogate time point for CAR expression.

### Evaluating Functionality of the Day 1 ARM Processed BCMA CART In Vivo

[1044] The day 1 CARTs were examined for their anti-tumor activity in vivo using a disseminated KMS-11-luc multiple myeloma xenograft mouse model. The luciferase reporter allows for monitoring of disease burden by quantitative bioluminescence imaging (BLI). Briefly, day 1 CARTs manufactured as described above were administered in tumor-bearing mice. In the first in vivo study (FIGS. 21A and 21B), each mouse received a final CART product at a dose of 1.5E6 cells. CAR expression was analyzed at day 1 and day 7 (FIG. 21A). In the in vivo efficacy study, cells expressing PI61, R1G5 or R1B6 demonstrated potent anti-tumor activities (FIG. 21B). Cells expressing R1F2 showed a delayed efficacy (FIG. 21B). The UTD group also showed partial anti-tumor activity 14 days after CART injection, which could be due to alloreaction (FIG. 21B). A second in vivo study tested dose titration of the CAR+T cells. The doses of CAR+T cells were based on CAR+ % at day 3 (FIG. 22A). Tumor intake kinetics was monitored twice a week by BLI measurement. FIG. 22A shows CAR expression detected at day 1 and day 3. The in vivo results indicate that all three clones PI61, R1B6 and R1G5 at both doses of 1.5e5 CAR+ T cells and 5e4 CAR+ T cells were able to reject and clear tumor as shown in FIG. 22B. FIG. 22C shows body weight changes over the course of this study, displaying no indication of GVHD.

### Example 6 Kinetics of Rapid CARTs Harvested Between 12-24 Hours

### Introduction

[1045] To determine whether a rapid CART product could be generated in less than 24 hours, the kinetics for harvesting rapid CARTs generated after 12-24 hours in culture was characterized. This evaluation was performed at small scale using T cells enriched from cryopreserved healthy donor apheresis and simultaneous addition of TransAct activation reagent and technical grade CTL019 vector at seeding. Primary readouts were viability, viable cell recovery post-expansion, leukocyte and T cell subset composition, and transduction efficiency (as determined via surface immunophenotyping) on freshly harvested CART products.

### Methods

[1046] Lentivirus production and titer determination: The lentiviral vector encoding CTL019 was prepared with a HEK293T-based qPCR titer of 4.7×107 TU/mL and an approximated T cell-based titer of 1.88×107 TU/mL.

[1047] T cell isolation: A cryopreserved leukopak (LKPK) of healthy donor apheresis was obtained from Hemacare and stored in liquid nitrogen until needed. On Day 0, the apheresis was thawed until a small ice crystal remained, and then diluted with Prodigy® process buffer. Automated CD4/CD8 positive selection was then performed on the CliniMACS® Prodigy® with the TS 520 tubing set and T Cell Transduction (TCT) program software version 1.0. The final Prodigy® product was eluted in OpTmizer™ complete T cell medium, and cell concentration and viability were determined by AO/PI staining as enumerated by the Cellometer Vision (Nexcelom).

[1048] Culture initiation and transduction: Cells from the Prodigy® product were immediately seeded into a total of seven vessels: five vessels for transduced cultures and two vessels for untransduced (UTD) cultures. At timepoint zero, each vessel was seeded at a density of 0.6×10⁶ viable cells per cm² of membrane, plus GMP-grade TransAct, and brought to a final concentration of 1.2×10⁶ viable cells/mL with OpTmizer™ complete T cell media containing IL-2. Vector was thawed at room temperature and added to each transduced culture at a MOI of 0.45 based on the approximated T cell titer. No virus was added to the UTD controls. Once seeded, cultures were incubated at 37° C. and 5% CO₂ until ready for harvest.

[1049] Harvest: At each timepoint 12 to 24 hours after culture initiation, one transduced culture was selected for harvest. Cells were harvested by swirling the vessel to gently resuspend the cells off the membrane, then the full culture volume resuspended and transferred by serological pipette to a conical tube. A small aliquot was taken for a pre-wash count, viability determination, and flow staining. The remainder of each culture was washed twice in 50mL (twice in 100mL for UTD vessels), resuspended, and a post-wash aliquot taken to examine counts and viability.

[1050] Flow cytometry of leukocyte composition and CD19-CAR expression during CART manufacturing: In-process samples before and after culturing were stained for leukocyte composition, T cell phenotype, and CAR expression where applicable. CTL019-CAR expression on transduced T cells was evaluated using a custom-ordered fluorophore-labeled anti-idiotype antibody (eBioscience). At each harvest timepoint, aliquots of the culture were immediately stained with viability dye (Biolegend), washed, then stained with two flow panels both containing a CD3 stain and the anti-idiotype antibody and fixed in paraformaldehyde for acquisition. Samples were measured on a flow cytometer (BD LSRFortessa; single color controls were used for compensation), and data was analyzed with FlowJo software. For analysis, all samples stained for leukocyte composition were pre-gated on viable CD45+ singlet events and all samples stained for T cell subsets were pre-gated on viable CD3+ singlet events. Gates for CD45RO and CCR7 were established using fluorescence minus one (FMO) controls.

### Results

[1051] The leukocyte composition of the LKPK, Prodigy® product before culture, and the CART products after culture were characterized using flow cytometry on Day 0 and each harvest time point. The cell types identified were T cells (CD3+), monocytes (CD14+), B cells (CD19+), natural killer (NK) cells (CD3-56+), and other cells (Table 22). Prodigy® enrichment produced a Day 0 starting material that was highly viable (92.9%) and enriched for T cells (from 48% to 92%) while reducing contaminating B cells (6% to 0.10%) and monocytes and NK cells to under 4% each. After 12-24 hours in culture, the purity of the viable cells increased an additional 3-4.4%, corresponding with an immediate reduction of monocytes and B cells by hour 12 and gradual reduction of NK cells between hours 12 and 24. Of the leukocytes that express extracellular CAR by flow cytometry, less than 3% were contaminant cells (i.e. not T cells), with the greatest jump in CAR purity (96.6% to 99.2%) occurring between 15 and 18 hours after seeding.

TABLE 22

Gross leukocyte composition of CART products
% of population

| Timepoint | Product or Subpopulation | CD3+ | CD 14+ | CD19+ | CD3-CD56+ | Other |
|---|---|---|---|---|---|---|
| Day 0 | LKPK | 48% | 29% | 6.0% | 11.6% | 5.0% |
| | Prodigy® Product | 92% | 3% | 0.10% | 3.7% | 0.4% |
| CARTs pre-freeze | 12 hr | 95.3% | 0.2% | 0.02% | 3.3% | 1.1% |
| | 15 hr | 95.6% | 0.2% | 0.01% | 3.3% | 0.9% |
| | 18 hr | 96.4% | 0.1% | 0.0% | 2.7% | 0.9% |
| | 21 hr | 96.3% | 0.2% | 0.0% | 2.3% | 1.2% |
| | 24 hr | 96.2% | 0.2% | 0.0% | 2.2% | 1.5% |
| | 24 hr UTD (n=2) | 96.4% | 0.1% | 0.06% | 2.4% | 1.1% |
| | 12 hr (of CAR+ only) | 97.1% | 0.6% | 0.0% | 2.4% | 0.0% |
| | 15 hr (of CAR+ only) | 96.6% | 0.9% | 0.0% | 2.5% | 0.0% |
| | 18 hr (of CAR+ only) | 99.2% | 0.1% | 0.0% | 0.7% | 0.0% |
| | 21 hr (of CAR+ only) | 99.1% | 0.3% | 0.0% | 0.7% | 0.0% |
| | 24 hr (of CAR+ only) | 98.9% | 0.3% | 0.0% | 0.8% | 0.0% |

[1052] The increase in purity of CAR-expressing cells 18 hours into culture (Table 22) coincides with an increase in the percentage of T cells with CAR surface expression (FIGS. 23A and 23C). As observed previously with rapid CART products evaluated by flow cytometry after 24 hours in culture (see Example 5), CAR surface expression did not lead to distinct positive and negative populations. Gating for CAR positivity was therefore established using the UTD samples as the lower bound. The proportion of CD3+ cells expressing extracellular CAR remained below 1% until 15 hours post-seeding; and CAR expression then increased 3-4% every three hours to a maximum of 11.8% without saturating (FIG. 23A). The intensity of CAR expression as determined by MFI also increased slightly >18 hours in culture but remained dim through hour 24 (FIG. 23B).

[1053] T cell subsets (CD4:CD8 ratio and memory subset composition) were also evaluated at each timepoint (FIGS. 24A and 24B) using a combination of CD4, CD8, CD45RO, and CCR7; where undifferentiated naive-like T cells were defined as CCR7+CD45RO-, central memory cells as CCR7+CD45RO+, effector memory cells as CCR7-CD45RO+, and highly differentiated effector T cells as CCR7-CD45RO-. Across all timepoints evaluated, including the UTD, cultures contained a greater proportion of naive cells (40-47%) and lower proportion of central memory cells (33-39%) than the initial starting material (23% and 52%, respectively). Interestingly, although the frequency of naive or central memory T cells in the bulk composition did not change between 12 to 24 hours, later harvests were correlated with a greater frequency of extracellular CAR-expressing cells that were naive and a lower frequency of extracellular CAR-expressing cells that were central memory (16% naive / 63% central memory among CAR-expressing cells at 18 hours vs. 24% naive / 54% central memory among CAR-expressing cells at 24 hours). Similarly, while bulk CD4:CD8 ratio did not change significantly, the CD4 fraction of the CAR+ cells decreased by 10% (66% to 56%) between 18-24 hours. Converting these frequencies to total cell numbers (FIG. 25) reveals that the subsets of T cells that appeared to express the CAR the earliest are mostly naive CD4 cells between 15-18 hours in culture; naive CD8 CARs and central memory CD8 CARs then rapidly increase in frequency.

[1054] Viable cell recovery (or fold expansion) as well as pre- and post-wash viability were determined at each harvest time point (FIGS. 26 and 27). Recovery of viable cells decreased by 13% until 18 hours post-seeding (lowest 46%, coinciding with the increased rate of extracellular CAR expression), then increased slightly to 52% for cultures harvested at later time points (FIG. 26). Product viability increased after washing to 71-77% with viability decreasing for harvests between 15-24 hours (FIG. 27).

### Conclusion

[1055] Of time points tested between 12-24 hours, rapid CARTs seeded simultaneously with TransAct and technical grade CTL019 vector show the highest CAR surface expression at 24 hours. Very few cells are CAR+ (as measured at the time of harvest) until 15 hours post-seeding, after which %CAR increases more rapidly. The intensity of CAR expression is dim but increases slowly after 18 hours post-seeding.

[1056] Rapid CART products become purer (greater % T cells) than the starting material at all points between 12 to 24 hours post-seeding due to monocyte loss in the first 12 hours, followed by a minor loss of NK cells and any residual B cells not removed by Prodigy® enrichment.

[1057] Although overall cell recovery is lowest when harvested 18 hours post-seeding (improving slightly by 24 hours), the overall T cell composition does not change between 12 and 24 hours post-seeding. T cells that first express extracellular CAR are mostly central memory CD4s between 15 and 18 hours post-seeding, then naive and central memory CD8s show CAR expression.

### Example 7 Description of the Activated Rapid Manufacturing (ARM) Process

[1058] In some embodiments, CART cells are manufactured using a continuous Activated Rapid Manufacturing (ARM) process, over approximately 2 days, which will potentially allow for a greater number of less differentiated T cells (T naive and T_{SCM} (stem central memory T) cells) to be returned to a patient for in vivo cellular expansion. The short manufacturing time period allows the early differentiated T cells profile to proliferate in the body for their desired terminal differentiated state rather that in an ex vivo culture vessel.

[1059] In some embodiments, CART cells are manufactured using cryopreserved leukapheresis source material, for example, non-mobilized autologous peripheral blood leukapheresis (LKPK) material. Cryopreserved source material undergoes processing steps for T cell enrichment on the first day of production (Day 0) by means of anti-CD4 / anti-CD8 immunomagnetic system. Positive fraction is then seeded in G-rex culture vessel, activated with an anti-CD3/CD28 system (TransACT) and on the same day transduced with a lentiviral vector (LV) encoding a CAR. On the following day, after 20-28 hours of transduction, the T cells are harvested, washed four times, formulated in freezing medium and then frozen by a Controlled Rate Freezer (CRF). From the start of the process on Day 0 to the initiation of harvest on the following day, cells are cultured for 20 - 28 hours with a target of 24 hours after Day 0 seeding.

[1060] Media for Day 0 were prepared according to Table 21. The cryopreserved leukapheresis material is thawed. The thawed cells are diluted with the Rapid Buffer (Table 21) and washed on the CliniMACS® Prodigy® device. The T cells are selected by CliniMACS® CD4 and CD8 microbeads. Once the program is finished for T cell selection (approximately 3 h 40 min to 4 h 40 min), the reapplication bag containing the cells suspended in Rapid Media (Table 21) are transferred in a transfer pack. A sample is taken for viability and cell count. The cell count and viability data from the positive fraction bag is used to determine the cell concentration when seeding the culture vessel for activation and vector transduction.

[1061] Following positive selection of T cells via the CliniMACS® microbeads (CD4 and CD8), the cells are seeded in the culture vessel, G-Rex. Once the cells are seeded, the activation reagent (TransACT) is then added to the culture vessel. The cells are then transduced with a lentiviral vector encoding a CAR at a target MOI of 1.0 (0.8-1.2). Following the vector addition, the culture vessel is transported to an incubator where it is incubated for a target of 24 hours (operating range 20-28 hours) at a nominal temperature of 37° C. (operating range 36-38° C.) with nominal 5% CO₂ (operating range 4.5-5.5%). Following the incubation, the cells are washed with Harvest Wash Solution (Table 21) four times to remove any non-integrated vector and residual viral particles, as well as any other process related impurities. Then, the cells are eluted and a sample for cell count and viability is taken for testing and the results are used to determine the volume required to re-suspend the cells for final formulation with CryoStor® CS10. The cells are then centrifugated to remove the Harvest Wash Solution and proceed with cryopreservation.

[1062] In some embodiments, the CAR expressed in CART cells binds to CD19. In some embodiments, IL-2 used in the Rapid Media (RM) (Table 21) can be replaced with IL-15, hetIL-15 (IL-15/sIL-15Ra), IL-6, or IL-6/sIL-6Ra.

[1063] In some embodiments, the CAR expressed in CART cells binds to BCMA. In some embodiments, IL-2 used in the Rapid Media (RM) (Table 21) can be replaced with IL-15, hetIL-15 (IL-15/sIL-15Ra), IL-6, or IL-6/sIL-6Ra.

### Example 8 Characterization of CD19 CART Cells Manufactured Using the Activated Rapid Manufacturing (ARM) Process

[1064] Disclosed herein is an anti-CD19 CAR-T cell product manufactured using the activated rapid manufacturing (ARM) process. The ARM process reduces the turnaround time compared to traditional manufacturing (TM) processes, prospectively allowing a timely infusion of the anti-CD19 CAR-T cell product to patients. Moreover, the ARM process also preserves putative stem memory T (Tₛₜₑₘ) cells, a cellular subset associated with improved antitumor efficacy. The main difference in manufacturing is that while the TM process includes an expansion phase in which anti-CD19 CAR T cells are cultured in vitro for 9 days with interleukin (IL-) 2 before being formulated, the ARM process allows formulation after only 24 hours of culture. This is made possible by the use of a fully biocompatible nanomatrix coupled to monoclonal antibodies (mAb) with agonistic activity against CD3 and CD28, which differently from the CD3/CD28 paramagnetic beads used in the TM process, can be washed away with the residual lentiviral vector right after transduction. Results from a xenograft mouse model, as well as final product enrichment for Tₛₜₑₘ cells, a subpopulation associated with increased persistence and long-term antitumor effects, suggest an overall improved therapeutic potential of anti-CD19 CAR T cells manufactured using the ARM process as compared to anti-CD19 CAR T cells manufactured using the TM process. Another important difference revealed by the xenograft mouse model is a potential delayed cellular kinetics expansion of anti-CD19 CAR T cells manufactured using the ARM process for approximately one week compared to the counterparts manufactured using the TM process. This delay is estimated to be approximately 1 week, which imposes corresponding prolongation of the window for careful monitoring of potential toxicities from 3 weeks, as with anti-CD19 CAR T cells manufactured using the TM process, to 4 weeks. Conversely, non-clinical safety data from an in vitro cytokine release model indicate that anti-CD19 CAR T cells manufactured using the ARM process and those manufactured using the TM process might have a similar potential to induce IL-6 production in vivo and therefore carry a similar cytokine release syndrome (CRS) risk. Based on this evidence, anti-CD19 CAR T cells manufactured using the ARM process will be investigated in a Phase I, open label clinical study in patients with advanced small lymphocytic lymphoma (SLL)/chronic lymphocytic leukemia (CLL) in combination with the Bruton tyrosine kinase inhibitor (BTKi) ibrutinib (Imbruvica), an already approved drug in this indication, and as single agent in DLBCL.

### Generation and In Vitro Analysis

[1065] To test the ARM process for anti-CD19 CAR T cell manufacturing at clinical scale, a frozen healthy donor leukapheresis product (Leukopak, LKPK) was used as starting material, described in FIG. 28A as a representative example. The LKPK contained 37% T cells, 4% NK cells, 37% monocytes and 15% B cells (FIG. 28A). After thawing, T cells were positively selected using anti-CD4 and anti-CD8 microbeads. The composition of the product after positive T cell selection was 95.4% T cells, 1.9% NK cells, 1.7% monocytes, and 0.1% B cells (FIG. 28A).

[1066] Positively selected T cells were activated using a polymeric nanomatrix conjugated to anti-CD3 and anti-CD28 agonist monoclonal antibodies and transduced with a lentiviral vector encoding anti-CD19 CAR. After 24 hours in culture, cells were harvested and cryo-preserved (such cells are referred to as “ARM-CD19 CAR” in this example). In parallel, CAR-T cells were generated using a traditional manufacturing (TM) process (such cells are referred to as “TM-CD19 CAR” in this example), using the same donor T cells and lentiviral vector. The TM process utilized paramagnetic beads coupled to anti-CD3 and anti-CD28 antibodies and a 9-day culture period in tissue-culture flasks, followed by the same harvest and freezing procedure. CAR-T cells generated by each process were analyzed by flow cytometry to evaluate CAR expression post thaw, as well as the Tcell phenotype (FIGS. 28B-28D). Analysis of the T-cell phenotype revealed that the ARM process retained naive-like T cells (45.1% CD45RO-/CCR7+) in both the CD8 and CD4 compartments, while the TM process mainly resulted in central-memory T (T_{CM}) cells (68.6% CD45RO+/CCR7+ compared to 43.6% for ARM-CD19 CAR) (FIGS. 28C and 28D). Importantly, the ARM process better maintained the initial naive-like CD45RO-/CCR7+ T-cell population as compared to the TM process, also in the CAR+ population (28.6% in starting material, 37.5% for ARM-CD19 CAR and 4.5% for TM-CD19 CAR) (FIGS. 28C and 28D). This T-cell population largely overlaps with CD45RO-/CD27+ Tstem cells described by Fraietta, et al (2018) Nat Med, 24(5); 563-571 and associated with sustained remission in a CLL phase I clinical trial.

[1067] In addition to its phenotype, the final ARM-CD19 CAR cell product was also assessed for its function in vitro. ARM-CD19 CAR and TM-CD19 CAR were thawed and co-cultured with the CD19-expressing cell lines NALM6 (ALL) or TMD-8 (DLBCL). Comparison of cytokine levels in the supernatants 48 hours after co-culture revealed a 11- to 17-fold increase of IFN-γ and a 3.5- to 10-fold increase in levels of IL-2 secreted by ARM-CD19 CAR as compared to TM-CD19 CAR, depending on the stimulating cancer cells (NALM6 or TMD-8,

[1068] FIGS. 29A and 29C). Experiments with untransduced (UTD) cells that underwent the ARM or TM process (FIG. 29C), or with CD19-negative NALM6 (NALM6-19KO) target cells (FIG. 29D) confirmed CD 19-specific recognition by ARM-CD19 CAR and TM-CD19 CAR. Higher background of IFN-γ secretion by ARM-UTD and ARM-CD19 CAR in the absence of CD19-specific stimulation (FIGS. 29A and 29B, respectively) is likely due to the activated nature of these products. This background secretion decreased by 48 hours of coculture (FIGS. 29B and 29D). An intermediate wash of the cells after the first 24 hours of coculture with target cells, followed by co-culture for additional 24 hours (24 h+24 h) further enhanced the difference between background and CD19-specific cytokine secretion. This 24 h+24 h condition highlights that background IFN-γ secretion by ARM-CD19 CAR abates after the first 24 hours.

[1069] In summary, the ARM process used to generate ARM-CD19 CAR results in T cells with CAR-expression similar or higher than that of TM-CD19 CAR. Importantly, the ARM process maintains a T-cell phenotype similar to the input material. ARM-CD19 CAR demonstrates CD19-specific activation in vitro, and secretes higher levels of IL-2 as compared to TM-CD19 CAR, which correlates with its Tₛₜₑₘ phenotype.

### In Vivo Efficacy

[1070] Efficacy studies in vivo were used to guide the development of the ARM process, ultimately leading to the process that will be used for clinical anti-CD19 CAR T cell manufacturing. For the experiment described here, ARM-CD19 CAR was generated at clinical scale. In parallel, TM-CD19 CAR was generated using the same lentiviral vector and T cells from the same donor. The efficacy of CAR-T cells generated using the different processes was evaluated in immunodeficient NSG mice (NOD-scid IL2Rg-null), which were inoculated with the pre-B ALL cell line NALM6. This tumor cell line engrafts in the bone marrow, but in case of high tumor burdens can also be detected in the circulation. Seven days after leukemia inoculation, cohorts of mice received a single infusion of CAR+ T cells (FIG. 30A). Planned doses of 0.2×10⁶, 0.5×10⁶ and 2×10⁶ viable CAR+ T cells were determined based on post thaw flow analysis of TM-CD19 CAR and ARM-CD19 CAR on day 0.

[1071] Because of the concern of pseudo-transduction for ARM-CD19 CAR on day 0 post thaw, a sentinel vial was thawed and cultured for up to 5 days, and CAR expression (percentage and mean fluorescence intensity) was analyzed by flow cytometry at different time points (FIG. 30B). The percentage of positive cells on later time points was lower as compared to the day 0 post-thaw sample. At the same time, CAR mean fluorescence intensity was higher per cell, reflective of stably transduced CAR-T cells. The measurement on day 3 was used to determine the actual dose of ARM-CD19 CAR, which was determined to be 0.1×10⁶, 0.25×10⁶ and 1×10⁶ viable CAR+ T cells. The TM-CD19 CAR dose remained unchanged (0.2×10⁶, 0.5×10⁶ and 2×10⁶ viable CAR+ T cells), as the flow analysis of post-thaw samples was performed on rested, fully integrated CART cells.

[1072] Both ARM-CD19 CAR and TM-CD19 CAR induced tumor-regression in a dose-dependent manner (FIG. 30C). Mice treated with 0.5×10⁶ or 2×10⁶ TM-CD19 CAR cells, or 0.25×10⁶ or 1×10⁶ARM-CD19 CAR cells, experienced durable tumor regression. Interestingly, at the respective lowest dose tested (0.2×10⁶ TM-CD19 CAR cells or 0.1×10⁶ ARM-CD19 CAR cells), response to TM-CD19 CAR was not sustained and all mice eventually relapsed after initial partial leukemia control. In contrast, at the lowest dose (0.1x10⁶) ARM-CD19 CAR-treated mice showed a steady decline of tumor burden that lasted until the end of study. The kinetics of tumor regression suggest a delayed activation of ARM-CD19 CAR by about 1 week, suggesting that Tₛₜₑₘ cells need to proliferate and differentiate into effector cells in order to exert their antitumor activity.

[1073] Mice treated with CAR-T cells and UTD cells generated by the two manufacturing processes were bled twice weekly to measure cytokine levels (FIGS. 31A-31D). Circulating IFN-γ levels in mice infused with CAR-T cells, either ARM-CD19 CAR or TM-CD19 CAR, showed a bi-phasic pattern (FIG. 31A). An early IFN-γ peak was observed at days 4-7 after CAR-T cell infusion and likely related to CD19-specific activation following tumor recognition, since it was not evident in mice infused with TM-UTD or ARM-UTD (FIG. 31B). Early CD19-mediated activation was confirmed by a concomitant rise of in vivo IL-2 levels (FIG. 31C), which however abated at later time points.

### In Vivo Cellular Kinetics

[1074] As part of a pharmacology study to evaluate the efficacy of ARM-CD19 CAR in NSG mice, the expansion of CAR+ T cells was assessed in vivo (FIG. 32). CD3+/CAR+ T-cell concentration in blood was analyzed by flow cytometry up to 4 weeks after infusion. CAR-T cell expansion can be inferred. However, long-term persistence cannot be assessed due to limited study time dictated by onset of X-GVHD. Cellular expansion was observed for both ARM-CD19 CAR and TM-CD19 CAR at all doses, except for TM-CD19 CAR at the lowest dose of 0.2x10⁶ cells. Exposure (Cmax and AUC within 21 days post cell injection) increased with increasing dose for both TM-CD19 CAR and ARM-CD19 CAR. To compare the expansion of ARM-CD19 CAR to TM-CD19 CAR at the same dose level, exposure of TM-CD19 CAR was interpolated to comparable doses of ARM-CD19 CAR (0.25×10⁶ and 1×10⁶ cells). The Cmax was 24- to 46-times higher and the AUC0-21d was 18- to 33-times higher compared to TM-CD19 CAR at doses of 0.25×10⁶ and 1×10⁶cells. The time to ARM-CD19 CAR peak expansion (Tmax) was delayed for at least 1 week compared to TM-CD19 CAR.

[1075] In summary, pharmacology studies evaluating ARM-CD19 CAR in vitro show that ARM-CD19 CAR has an early-differentiated phenotype and has the potential to secrete more IFN-γ and IL-2. In vivo, ARM-CD19 CAR demonstrated delayed but higher cellular expansion, induced more IL-2 secretion, and controlled tumor growth at lower doses as compared to TM-CD19 CAR. Other features of ARM-CD19 CAR discussed, such as elevated levels of plasma IFN-γ at later time points and earlier occurrence of X-GVHD were seen both for ARM-CD19 CAR, as well as for ARM-UTD, underlying the limitations of the xenograft mouse model used here. Together, these results support the hypothesis that ARM-CD19 CAR contains T cells with more stemness features, enabling ARM-CD19 CAR to effectively engraft, expand and reject tumors.

### In Vitro IL-6 Release Assay

[1076] A three-party co-culture model for the in vitro investigation of IL-6 induction potential by CART cells was first published by Norelli, et al (2018) Nat Med., Jun;24(6); 739-748 and applied here with some adaptations. This model consists of CAR-T cells, leukemic target cells and bystander THP-1 monocytic cells, as a source of myeloid cells for maximized IL-6 production. In this in vitro cellular model, IL-6 secretion by either ARM-CD19 CAR or TM-CD19 CAR alone was increased by co-culturing with CD19-expressing targets and THP-1 cells (FIGS. 33A and 33B). Importantly, time-dependent CD19-specific IL-6 secretion induced by ARM-CD19 CAR was superimposable to that induced by TM-CD19 CAR. In the same in vitro model, CD19-specific IFN-γ secretion in the ARM-CD19 CAR condition was 10-fold higher than in the TM-CD19 CAR condition (data not shown).

### Summary

[1077] These results suggest that ARM-CD19 CAR might have greater antitumor potential and a similar safety profile as compared to TM-CD19 CAR. Greater antitumor potential is inferred by better tumor control at the lowest dose tested and by higher in vivo cellular expansion. Such a calculation may however be an underestimation of the overall therapeutic potential of ARM-CD19 CAR, since this was assayed in an ALL model (NALM6) which is more aggressive than the two disease indications (CLL and DLBCL) in which ARM-CD19 CAR will be initially investigated. In CLL, in particular, where in vivo CAR-T cell expansion robustly correlates with tumor regression (Mueller, et al (2017) Blood. 130(21); 2317-2325; Fraietta, et al (2018) Nat Med, 24(5); 563-571), significantly higher proliferative potential of ARM-CD19 CAR (up to 20-fold) might result in meaningful superior efficacy compared to TM-CD19 CAR.

[1078] In mice, the early systemic release of IFN-γ and IL-2 by ARM-CD19 CAR associated with CAR-mediated tumor regression was 3-fold and 10-fold higher than that induced by traditionally manufactured CAR-T cells, respectively. IL-6 levels were not studied in vivo, since in this strain lack of functional myeloid cells results in the inability to produce inflammatory cytokines (Norelli, et al (2018) Nat Med., Jun;24(6); 739-748; Giavridis, et al (2018) Nat Med., Jun;24(6);731-738). To obviate this and evaluate the potential for in vivo IL-6 release induced by ARM-CD19 CAR, an in vitro three-party co-culture system was employed, in which bystander monocytic cells are added as a source of inflammatory cytokines (Norelli, et al (2018) Nat Med., Jun;24(6); 739-748). In this system, IL-6 production was similar between ARM-CD19 CAR and traditionally manufactured CAR-T cells, suggesting a similar risk for CRS. Conversely, the delayed kinetics of ARM-CD19 CAR cellular expansion will require an extension of the CRS monitoring period from the 3 weeks typical of TM-CD19 CAR, to 4 weeks. In vitro experiments with ARM-CD19 CAR also revealed the potential for transient, non-CAR-mediated IFN-γ and IL-2 secretion by ARM-CD19 CAR during the first 3 days of culture after thawing. A comprehensive risk assessment based on data from patients receiving recombinant human IL-2 (Proleukin) and recombinant human IFN-γ (ACTIMMUNE), and taking in consideration the projected exposures following ARM-CD19 CAR infusion indicates that the risk for constitutional symptoms (fever, chills, erythema) as described in these patients, would be very low. To further mitigate this risk, patients receiving ARM-CD19 CAR will be hospitalized for at least 72 hours after infusion of the cellular product.

[1079] Finally, in the non-GLP compliant toxicology study, NSG mice engrafted with ARM-CD19 CAR did not show unexpected behavior in comparison to traditionally manufactured CAR-T cells and untransduced cells undergoing the ARM process, when assessed by blood or lymphatic organ immunophenotyping, as well as histological evaluation of a relevant set of organs.

### Example 9 BCMA CART Cells Manufactured Using the ARM Process

### Methods

### T Cell Isolation

[1080] Fresh leukopak of healthy donor aphereses were obtained from Hemacare and stored in vapor phase liquid nitrogen (LN2) until needed. On Day 0, two quarter leukopaks were removed from LN2, warmed in the Plasmatherm (Barkey, Leopoldshöhe, Germany) until a small ice crystal remained, and diluted with Prodigy® process buffer. Automated CD4/CD8 positive selection was then performed on the CliniMACS® Prodigy® with the TS 520 tubing set and T Cell Transduction (TCT) program software version 1.0. Cell count and viability for each Prodigy® output (product, waste, and nontarget cells) were determined by AO/PI staining as enumerated by the Cellometer Vision (Nexcelom, Lawrence, MA) to assess total cell recovery and T cell recovery. The CD4/CD8-enriched product was eluted in OpTmizer™ complete T cell medium and divided for further culturing using either the 24 h or traditional 9-day process (TM). Remaining T cells were frozen down in LN tank. T cell purity was evaluated by flow cytometry analyses.

### CAR-T Cells Production Using the ARM Process

[1081] T cells purified by Prodigy® were seeded into different scales of vessels, such as plate, flask, G-REX vessel or full clinical scale in centricult. Upon seeding, TransAct (Miltenyi Biotec)), a polymeric nanomatrix conjugated to anti-CD3 and anti-CD28 agonist, was added, in addition to clinical-grade lentiviral vector. Cells were incubated in OpTmizer™ complete T cell media containing 100 IU/mL human recombinant IL-2 (Prometheus, San Diego, CA), 2% ICRS (Life Technologies) for 24 h prior to harvest and cryopreservation.

[1082] Aliquots of cryopreserved CAR-T cells were thawed into pre-warmed OpTmizer™ complete media, washed twice with 20x volume of pre-warmed medium before culturing and flow cytometry analyses for assessing BCMA-CAR expression and stemness features at different time points post-thaw. Aliquots of the cell products were co-cultured with target cell lines to assess cytokine release in response to specific antigen stimulation.

### CAR-T Cells Production Using TM Process

[1083] Prodigy® processed T cells were resuspended in warm RPMI complete T cell medium and plated in 24-well plates. T cells were incubated overnight at 37° C. with Human T-Expander CD3/CD28 beads at a 3:1 ratio of beads-to-cells.

[1084] On Day 1, lentiviruses were added at a MOI of 2, based on the SUP-T1titer. No virus was added to the untransduced control (UTD). The T cells were incubated overnight at 37° C. followed by the addition of 1 mL complete T cell medium per well, after which they were incubated overnight at 37° C. For the remaining seven days of culture expansion, the T cells were transferred into tissue culture flasks and diluted with complete T cell medium every two days.

[1085] Between Days 8 to 9, the T cells were de-beaded, harvested and cryopreserved in CryoStor CS10 freezing medium, frozen at -80° C. in CoolCell Cell Freezing Containers (Biocision), and transferred to LN2 the following day. Small aliquots of T cells were stained for CAR expression. Single color controls were included for compensation. Samples were measured on a flow cytometer (BD LSRFortessa), and data were analyzed with FlowJo software.

### Target Cell Line and Culture

[1086] Nalm6 cells were transfected with a lentiviral firefly luciferase reporter construct to create the Nalm6-luc cell line. The cells were grown in incubators at 37° C. with 5% CO₂. An aliquot of cells was used for detection of tumor antigen BCMA expression prior to use.

### In Vitro Cytokine Secretion Assay

[1087] Cytokine secretion of anti-BCMA CAR-T (referred to as effector cells) in response to a BCMA-expressing target cell was evaluated by incubating CAR-T cells with target cells at 2.5-fold E:T ratio for 20 h in 96-well flat-bottom plates. Effector cells were PI61, R1G5 and BCMA10 CART cells generated using either the ARM or TM process. CART cells manufactured using the ARM process were plated for a 24 h washout condition to allow the cells to rest and minimize non-specific activity. Target cells include BCMA positive KMS11-luc or BCMA negative NALM6-luc. These target cells were added to the freshly plated T cells or T cells from the 24 h washout condition (ARM cells only). For this assay, the % transduction of CAR-T cells was normalized by addition of UTD to the BCMA CAR-Ts. This allowed for the comparison of the same number of CAR-Ts and same total T cell number in each sample. Supernatants from the 20-hour co-culture time point of effector to target were harvested from each well and frozen at -20° C. to be used for MSD cytokine analysis. The custom MSD V-PLEX Human IFN-γ, IL-2 Kit (#K151A0H-4A) was used to quantify the secreted cytokines in each of the supernatant samples.

### Results

### ARM Process Preserves T Cell Stemness

[1088] CAR-T cells generated using the ARM process were analyzed by flow cytometry to evaluate their CAR expression at thaw and 48h post thaw, as well as the T-cell phenotype (FIGS. 34A, 34B, and 34C). For CAR-T cells manufactured using the TM process, CAR expression was assessed at day 9 before harvest (FIG. 35A). BCMA-CAR was almost undetectable at thaw shown in FIG. 34A. However, at 48 h post-thaw, BCMA-CAR was clearly being expressed as 32.9% for PI61, 35.9% for R1G5 and 17.4% for BCMA10. The day 9 cells generated using the TM process show BCMA-CAR expression to be 36% for PI61, 40% for R1G5 and 7% for BCMA10 (FIG. 35A). Analysis of the CAR+T-cell phenotype revealed that the ARM process retained naive-like T cells (-60% of CD45RO-/CCR7+ for PI61 and R1G5, 32% of CD45RO-/CCR7+ for BCMA10) (FIG. 34C). The TM process mainly resulted in central-memory T cells (TCM) (72 -81% CD45RO+/CCR7+ for all three BCMA CAR-Ts), while the naive-like T cell population was almost gone in the CAR+T cells manufactured using the TM process (FIG. 35B). Overall, the naive T-cell population largely overlaps with CD45RO-/CD27+ Tstem cells described by previous reports (Cohen AD, et al (2019). J Clin Invest. 130. pii: 126397. doi: 10.1172/JCI126397; Fraietta, JA, et al (2018). Nat Med, 24(5); 563-571) and is associated with responses and CAR-T expansion.

[1089] In addition to its phenotype, the final PI61, R1G5 and BCMA10 CART cell products were also assessed for their function in vitro. PI61, R1G5 and BCMA10 cell products were thawed and co-cultured with the BCMA-expressing cell line KMS-11 at 1:1 ratio. Post-thaw ARM processed cells were rested for 24 h prior to co-culture being established. Comparing cytokine levels in the supernatants 24 hours after co-culture revealed a ~5 to 25-fold increase of IL-2 and a ~3 to 7-fold increase in levels of IFN-γ secreted by ARM products as compared to TM products as shown in FIGS. 36A-36D. Experiments with untransduced (UTD) cells that underwent the ARM or TM process confirmed BCMA-specific recognition by PI61, R1G5 and BCMA10.

[1090] In summary, PI61, R1G5 and BCMA10 CART cells produced using the ARM process demonstrate BCMA-specific activation in vitro and secretes higher levels of IL-2 and IFN-γ as compared to TM processed products, which correlates with the Tstem phenotype of CART cells produced using the ARM process.

### Example 10 Gene Signature Analysis of CART Cells Manufactured Using the ARM Process

### Methods

### Single Cell RNAseq

[1091] Single cell RNAseq libraries were generated using the 10X Genomics Chromium Controller instrument and supporting library construction kits.

[1092] Cryopreserved cells were thawed, counted and flow sorted (if required for study question), prior to being loaded on a 10X Genomics Instrument. Individual cells were loaded into droplets and RNA within individual droplets was barcoded via a GemCode bead. Barcoded RNA was released from droplets and converted into a whole transcriptome Illumina compatible sequencing library.

[1093] Generated libraries were sequenced on an Illumina HiSeq Instrument and analyzed using 10X Genomics analysis pipeline and Loupe Cell Browser software.

### Single Cell Immune Cell Profiling

[1094] Whole transcriptome 10X Genomics single cell libraries were used as a template material to generate immune cell profiling and repertoire analysis. T cell receptor sequences were PCR amplified from Chromium Single Cell 5′ Libraries and analyzed on an Illumina sequencing instrument.

### Analysis Pipeline

[1095] Single cell RNAseq data was processed through the Cell Ranger analysis pipeline starting with FASTQ files. A detailed description of the Cell Ranger analysis pipeline can be found at: https://support.10xgenomics.com/single-cell-gene-expression/software/pipelines/latest/what-is-cell-ranger. The general pipeline included alignment, filtering, barcode counting, and UMI counting. Cellular barcodes were used to generate gene-barcode matrices, determine clusters, and perform gene expression analysis. Gene expression count data was normalized using the Seurat Bioconductor package. Cells were discarded from the analysis that had less than 200 expressed genes. Genes were discarded from the analysis that were only expressed in 2 cells or less. The remaining data was normalized with the Seurat log normalization method using a scale factor of 10,000. Data was scaled by regressing on the number of detected molecules per cell. The gene set score (GeneSetScore) was calculated by taking the mean log normalized gene expression value of all the genes in the gene set. Each gene is z-score normalized so that the mean expression of the gene across samples is 0 and standard deviation is 1. The gene set score is then calculated as the mean of the normalized values of the genes in the gene set. An exemplary gene set score calculation is described below.

[1096] For this example of gene set score calculation, the normalized gene expression of two (2) samples for six (6) genes is provided in Table 23. For the purposes of this exemplary calculation, the gene set consists of genes 1-4. Therefore, Sample 1 and 2 both have gene set scores of 0.

TABLE 23

Exemplary dataset for gene set score calculation

| | Sample 1 | Sample 2 |
|---|---|---|
| Gene 1 | -3 | 0 |
| Gene 2 | 3 | 0 |
| Gene 3 | 1 | 0 |
| Gene 4 | -1 | 0 |
| Gene 5 | 10 | 4 |
| Gene 6 | -5 | 3 |

[1097] The gene set “Up TEM vs. Down TSCM” includes the following genes: MXRA7, CLIC1, NAT13, TBC1D2B, GLCCI1, DUSP10, APOBEC3D, CACNB3, ANXA2P2, TPRG1, EOMES, MATK, ARHGAP10, ADAM8, MAN1A1, SLFN12L, SH2D2A, EIF2C4, CD58, MYO1F, RAB27B, ERN1, NPC1, NBEAL2, APOBEC3G, SYTL2, SLC4A4, PIK3AP1, PTGDR, MAF, PLEKHA5, ADRB2, PLXND1, GNAO1, THBS1, PPP2R2B, CYTH3, KLRF1, FLJ16686, AUTS2, PTPRM, GNLY, and GFPT2.

[1098] The gene set “Up Treg vs. Down Teff” includes the following genes: C12orf75, SELPLG, SWAP70, RGS1, PRR11, SPATS2L, SPATS2L, TSHR, C14orf145, CASP8, SYT11, ACTN4, ANXA5, GLRX, HLA-DMB, PMCH, RAB11FIP1, IL32, FAM160B1, SHMT2, FRMD4B, CCR3, TNFRSF13B, NTNG2, CLDND1, BARD1, FCER1G, TYMS, ATP1B1, GJB6, FGL2, TK1, SLC2A8, CDKN2A, SKAP2, GPR55, CDCA7, S100A4, GDPD5, PMAIP1, ACOT9, CEP55, SGMS1, ADPRH, AKAP2, HDAC9, IKZF4, CARD17, VAV3, OBFC2A, ITGB1, CIITA, SETD7, HLA-DMA, CCR10, KIAA0101, SLC14A1, PTTG3P, DUSP10, FAM164A, PYHIN1, MYO1F, SLC1A4, MYBL2, PTTG1, RRM2, TP53INP1, CCR5, ST8SIA6, TOX, BFSP2, ITPRIPL1, NCAPH, HLA-DPB2, SYT4, NINJ2, FAM46C, CCR4, GBP5, C15orf53, LMCD1, MKI67, NUSAP1, PDE4A, E2F2, CD58, ARHGEF12, LOC100188949, FAS, HLA-DPB1, SELP, WEE1, HLA-DPA1, FCRL1, ICA1, CNTNAP1, OAS1, METTL7A, CCR6, HLA-DRB4, ANXA2P3, STAM, HLA-DQB2, LGALS1, ANXA2, PI16, DUSP4, LAYN, ANXA2P2, PTPLA, ANXA2P1, ZNF365, LAIR2, LOC541471, RASGRP4, BCAS1, UTS2, MIAT, PRDM1, SEMA3G, FAM129A, HPGD, NCF4, LGALS3, CEACAM4, JAKMIP1, TIGIT, HLA-DRA, IKZF2, HLA-DRB1, FANK1, RTKN2, TRIB1, FCRL3, and FOXP3.

[1099] The gene set “Down stemness” includes the following genes: ACE, BATF, CDK6, CHD2, ERCC2, HOXB4, MEOX1, SFRP1, SP7, SRF, TAL1, and XRCC5.

[1100] The gene set “Up hypoxia” includes the following genes: ABCB1, ACAT1, ADM, ADORA2B, AK2, AK3, ALDH1A1, ALDH1A3, ALDOA, ALDOC, ANGPT2, ANGPTL4, ANXA1, ANXA2, ANXA5, ARHGAP5, ARSE, ART1, BACE2, BATF3, BCL2L1, BCL2L2, BHLHE40, BHLHE41, BIK, BIRC2, BNIP3, BNIP3L, BPI, BTG1, C11orf2, C7orf68, CA12, CA9, CALD1, CCNG2, CCT6A, CD99, CDK1, CDKN1A, CDKN1B, CITED2, CLK1, CNOT7, COL4A5, COL5A1, COL5A2, COL5A3, CP, CTSD, CXCR4, D4S234E, DDIT3, DDIT4, 1-Dec, DKC1, DR1, EDN1, EDN2, EFNA1, EGF, EGR1, EIF4A3, ELF3, ELL2, ENG, ENO1, ENO3, ENPEP, EPO, ERRFI1, ETS1, F3, FABP5, FGF3, FKBP4, FLT1, FN1, FOS, FTL, GAPDH, GBE1, GLRX, GPI, GPRC5A, HAP1, HBP1, HDAC1, HDAC9, HERC3, HERPUD1, HGF, HIF1A, HK1, HK2, HLA-DQB1, HMOX1, HMOX2, HSPA5, HSPD1, HSPH1, HYOU1, ICAM1, ID2, IFI27, IGF2, IGFBP1, IGFBP2, IGFBP3, IGFBP5, IL6, IL8, INSIG1, IRF6, ITGA5, JUN, KDR, KRT14, KRT18, KRT19, LDHA, LDHB, LEP, LGALS1, LONP1, LOX, LRP1, MAP4, MET, MIF, MMP13, MMP2, MMP7, MPI, MT1L, MTL3P, MUC1, MXI1, NDRG1, NFIL3, NFKB1, NFKB2, NOS1, NOS2, NOS2P1, NOS2P2, NOS3, NR3C1, NR4A1, NT5E, ODC1, P4HA1, P4HA2, PAICS, PDGFB, PDK3, PFKFB1, PFKFB3, PFKFB4, PFKL, PGAM1, PGF, PGK1, PGK2, PGM1, PIM1, PIM2, PKM2, PLAU, PLAUR, PLIN2, PLOD2, PNN, PNP, POLM, PPARA, PPAT, PROK1, PSMA3, PSMD9, PTGS1, PTGS2, QSOX1, RBPJ, RELA, RIOK3, RNASEL, RPL36A, RRP9, SAT1, SERPINB2, SERPINE1, SGSM2, SIAH2, SIN3A, SIRPA, SLC16A1, SLC16A2, SLC20A1, SLC2A1, SLC2A3, SLC3A2, SLC6A10P, SLC6A16, SLC6A6, SLC6A8, SORL1, SPP1, SRSF6, SSSCA1, STC2, STRA13, SYT7, TBPL1, TCEAL1, TEK, TF, TFF3, TFRC, TGFA, TGFB1, TGFB3, TGFBI, TGM2, TH, THBS1, THBS2, TIMM17A, TNFAIP3, TP53, TPBG, TPD52, TPI1, TXN, TXNIP, UMPS, VEGFA, VEGFB, VEGFC, VIM, VPS11, and XRCC6.

[1101] The gene set “Up autophagy” includes the following genes: ABL1, ACBD5, ACIN1, ACTRT1, ADAMTS7, AKR1E2, ALKBH5, ALPK1, AMBRA1, ANXA5, ANXA7, ARSB, ASB2, ATG10, ATG12, ATG13, ATG14, ATG16L1, ATG16L2, ATG2A, ATG2B, ATG3, ATG4A, ATG4B, ATG4C, ATG4D, ATG5, ATG7, ATG9A, ATG9B, ATP13A2, ATP1B1, ATPAF1-AS1, ATPIF1, BECN1, BECN1P1, BLOC1S1, BMP2KL, BNIP1, BNIP3, BOC, C11orf2, C11orf41, C12orf44, C12orf5, C14orf133, C1orf210, C5, C6orf106, C7orf59, C7orf68, C8orf59, C9orf72, CA7, CALCB, CALCOCO2, CAPS, CCDC36, CD163L1, CD93, CDC37, CDKN2A, CHAF1B, CHMP2A, CHMP2B, CHMP3, CHMP4A, CHMP4B, CHMP4C, CHMP6, CHST3, CISD2, CLDN7, CLEC16A, CLN3, CLVS1, COX8A, CPA3, CRNKL1, CSPG5, CTSA, CTSB, CTSD, CXCR7, DAP, DKKL1, DNAAF2, DPF3, DRAM1, DRAM2, DYNLL1, DYNLL2, DZANK1, EI24, EIF2S1, EPG5, EPM2A, FABP1, FAM125A, FAM131B, FAM134B, FAM13B, FAM176A, FAM176B, FAM48A, FANCC, FANCF, FANCL, FBXO7, FCGR3B, FGF14, FGF7, FGFBP1, FIS1, FNBP1L, FOXO1, FUNDC1, FUNDC2, FXR2, GABARAP, GABARAPL1, GABARAPL2, GABARAPL3, GABRA5, GDF5, GMIP, HAP1, HAPLN1, HBXIP, HCAR1, HDAC6, HGS, HIST1H3A, HIST1H3B, HIST1H3C, HIST1H3D, HIST1H3E, HIST1H3F, HIST1H3G, HIST1H3H, HIST1H3I, HIST1H3J, HK2, HMGB1, HPR, HSF2BP, HSP90AA1, HSPA8, IFI16, IPPK, IRGM, IST1, ITGB4, ITPKC, KCNK3, KCNQ1, KIAA0226, KIAA1324, KRCC1, KRT15, KRT73, LAMP1, LAMP2, LAMTOR1, LAMTOR2, LAMTOR3, LARP1B, LENG9, LGALS8, LIX1, LIX1L, LMCD1, LRRK2, LRSAM1, LSM4, MAP1A, MAP1LC3A, MAP1LC3B, MAP1LC3B2, MAP1LC3C, MAP1S, MAP2K1, MAP3K12, MARK2, MBD5, MDH1, MEX3C, MFN1, MFN2, MLST8, MRPS10, MRPS2, MSTN, MTERFD1, MTMR14, MTMR3, MTOR, MTSS1, MYH11, MYLK, MYOM1, NBR1, NDUFB9, NEFM, NHLRC1, NME2, NPC1, NR2C2, NRBF2, NTHL1, NUP93, OBSCN, OPTN, P2RX5, PACS2, PARK2, PARK7, PDK1, PDK4, PEX13, PEX3, PFKP, PGK2, PHF23, PHYHIP, PI4K2A, PIK3C3, PIK3CA, PIK3CB, PIK3R4, PINK1, PLEKHM1, PLOD2, PNPO, PPARGC1A, PPY, PRKAA1, PRKAA2, PRKAB1, PRKAB2, PRKAG1, PRKAG2, PRKAG3, PRKD2, PRKG1, PSEN1, PTPN22, RAB12, RAB1A, RAB1B, RAB23, RAB24, RAB33B, RAB39, RAB7A, RB1CC1, RBM18, REEP2, REP15, RFWD3, RGS19, RHEB, RIMS3, RNF185, RNF41, RPS27A, RPTOR, RRAGA, RRAGB, RRAGC, RRAGD, S100A8, S100A9, SCN1A, SERPINB10, SESN2, SFRP4, SH3GLB1, SIRT2, SLC1A3, SLC1A4, SLC22A3, SLC25A19, SLC35B3, SLC35C1, SLC37A4, SLC6A1, SLCO1A2, SMURF1, SNAP29, SNAPIN, SNF8, SNRPB, SNRPB2, SNRPD1, SNRPF, SNTG1, SNX14, SPATA18, SQSTM1, SRPX, STAM, STAM2, STAT2, STBD1, STK11, STK32A, STOM, STX12, STX17, SUPT3H, TBC1D17, TBC1D25, TBC1D5, TCIRG1, TEAD4, TECPR1, TECPR2, TFEB, TM9SF1, TMBIM6, TMEM203, TMEM208, TMEM39A, TMEM39B, TMEM59, TMEM74, TMEM93, TNIK, TOLLIP, TOMM20, TOMM22, TOMM40, TOMM5, TOMM6, TOMM7, TOMM70A, TP53INP1, TP53INP2, TRAPPC8, TREM1, TRIM17, TRIM5, TSG101, TXLNA, UBA52, UBB, UBC, UBQLN1, UBQLN2, UBQLN4, ULK1, ULK2, ULK3, USP10, USP13, USP30, UVRAG, VAMP7, VAMP8, VDAC1, VMP1, VPS11, VPS16, VPS18, VPS25, VPS28, VPS33A, VPS33B, VPS36, VPS37A, VPS37B, VPS37C, VPS37D, VPS39, VPS41, VPS4A, VPS4B, VTA1, VTI1A, VTI1B, WDFY3, WDR45, WDR45L, WIPI1, WIPI2, XBP1, YIPF1, ZCCHC17, ZFYVE1, ZKSCAN3, ZNF189, ZNF593, and ZNF681.

[1102] The gene set “Up resting vs. Down activated” includes the following genes: ABCA7, ABCF3, ACAP2, AMT, ANKH, ATF7IP2, ATG14, ATP1A1, ATXN7, ATXN7L3B, BCL7A, BEX4, BSDC1, BTG1, BTG2, BTN3A1, C11orf21, C19orf22, C21orf2, CAMK2G, CARS2, CCNL2, CD248, CD5, CD55, CEP164, CHKB, CLK1, CLK4, CTSL1, DBP, DCUN1D2, DENND1C, DGKD, DLG1, DUSP1, EAPP, ECE1, ECHDC2, ERBB2IP, FAM117A, FAM134B, FAM134C, FAM169A, FAM190B, FAU, FLJ10038, FOXJ2, FOXJ3, FOXL1, FOXO1, FXYD5, FYB, HLA-E, HSPA1L, HYAL2, ICAM2, IFIT5, IFITM1, IKBKB, IQSEC1, IRS4, KIAA0664L3, KIAA0748, KLF3, KLF9, KRT18, LEF1, LINC00342, LIPA, LIPT1, LLGL2, LMBR1L, LPAR2, LTBP3, LYPD3, LZTFL1, MANBA, MAP2K6, MAP3K1, MARCH8, MAU2, MGEA5, MMP8, MPO, MSL1, MSL3, MYH3, MYLIP, NAGPA, NDST2, NISCH, NKTR, NLRP1, NOSIP, NPIP, NUMA1, PAIP2B, PAPD7, PBXIP1, PCIF1, PI4KA, PLCL2, PLEKHA1, PLEKHF2, PNISR, PPFIBP2, PRKCA, PRKCZ, PRKD3, PRMT2, PTP4A3, PXN, RASA2, RASA3, RASGRP2, RBM38, REPIN1, RNF38, RNF44, ROR1, RPL30, RPL32, RPLP1, RPS20, RPS24, RPS27, RPS6, RPS9, RXRA, RYK, SCAND2, SEMA4C, SETD1B, SETD6, SETX, SF3B1, SH2B1, SLC2A4RG, SLC35E2B, SLC46A3, SMAGP, SMARCE1, SMPD1, SNPH, SP140L, SPATA6, SPG7, SREK1IP1, SRSF5, STAT5B, SVIL, SYF2, SYNJ2BP, TAF1C, TBC1D4, TCF20, TECTA, TES, TMEM127, TMEM159, TMEM30B, TMEM66, TMEM8B, TP53TG1, TPCN1, TRIM22, TRIM44, TSC1, TSC22D1, TSC22D3, TSPYL2, TTC9, TTN, UBE2G2, USP33, USP34, VAMP1, VILL, VIPR1, VPS13C, ZBED5, ZBTB25, ZBTB40, ZC3H3, ZFP161, ZFP36L1, ZFP36L2, ZHX2, ZMYM5, ZNF136, ZNF148, ZNF318, ZNF350, ZNF512B, ZNF609, ZNF652, ZNF83, ZNF862, and ZNF91.

[1103] The gene set “Progressively up in memory differentiation” includes the following genes: MTCH2, RAB6C, KIAA0195, SETD2, C2orf24, NRD1, GNA13, COPA, SELT, TNIP1, CBFA2T2, LRP10, PRKCI, BRE, ANKS1A, PNPLA6, ARL6IP1, WDFY1, MAPK1, GPR153, SHKBP1, MAP1LC3B2, PIP4K2A, HCN3, GTPBP1, TLN1, C4orf34, KIF3B, TCIRG1, PPP3CA, ATG4D, TYMP, TRAF6, C17orf76, WIPF1, FAM108A1, MYL6, NRM, SPCS2, GGT3P, GALK1, CLIP4, ARL4C, YWHAQ, LPCAT4, ATG2A, IDS, TBC1D5, DMPK, ST6GALNAC6, REEP5, ABHD6, KIAA0247, EMB, TSEN54, SPIRE2, PIWIL4, ZSCAN22, ICAM1, CHD9, LPIN2, SETD8, ZC3H12A, ULBP3, IL15RA, HLA-DQB2, LCP1, CHP, RUNX3, TMEM43, REEP4, MEF2D, ABL1, TMEM39A, PCBP4, PLCD1, CHST12, RASGRP1, C1orf58, C11orf63, C6orf129, FHOD1, DKFZp434F142, PIK3CG, ITPR3, BTG3, C4orf50, CNNM3, IFI16, AK1, CDK2AP1, REL, BCL2L1, MVD, TTC39C, PLEKHA2, FKBP11, EML4, FANCA, CDCA4, FUCA2, MFSD10, TBCD, CAPN2, IQGAP1, CHST11, PIK3R1, MYO5A, KIR2DL3, DLG3, MXD4, RALGDS, S1PR5, WSB2, CCR3, TIPARP, SP140, CD151, SOX13, KRTAP5-2, NF1, PEA15, PARP8, RNF166, UEVLD, LIMK1, CACNB1, TMX4, SLC6A6, LBA1, SV2A, LLGL2, IRF1, PPP2R5C, CD99, RAPGEF1, PPP4R1, OSBPL7, FOXP4, SLA2, TBC1D2B, ST7, JAZF1, GGA2, PI4K2A, CD68, LPGAT1, STX11, ZAK, FAM160B1, RORA, C8orf80, APOBEC3F, TGFBI, DNAJC1, GPR114, LRP8, CD69, CMIP, NAT13, TGFB1, FLJ00049, ANTXR2, NR4A3, IL12RB1, NTNG2, RDX, MLLT4, GPRIN3, ADCY9, CD300A, SCD5, ABI3, PTPN22, LGALS1, SYTL3, BMPR1A, TBK1, PMAIP1, RASGEF1A, GCNT1, GABARAPL1, STOM, CALHM2, ABCA2, PPP1R16B, SYNE2, PAM, C12orf75, CLCF1, MXRA7, APOBEC3C, CLSTN3, ACOT9, HIP1, LAG3, TNFAIP3, DCBLD1, KLF6, CACNB3, RNF19A, RAB27A, FADS3, DLG5, APOBEC3D, TNFRSF1B, ACTN4, TBKBP1, ATXN1, ARAP2, ARHGEF12, FAM53B, MAN1A1, FAM38A, PLXNC1, GRLF1, SRGN, HLA-DRB5, B4GALT5, WIPI1, PTPRJ, SLFN11, DUSP2, ANXA5, AHNAK, NEO1, CLIC1, EIF2C4, MAP3K5, IL2RB, PLEKHG1, MYO6, GTDC1, EDARADD, GALM, TARP, ADAM8, MSC, HNRPLL, SYT11, ATP2B4, NHSL2, MATK, ARHGAP18, SLFN12L, SPATS2L, RAB27B, PIK3R3, TP53INP1, MBOAT1, GYG1, KATNAL1, FAM46C, ZC3HAV1L, ANXA2P2, CTNNA1, NPC1, C3AR1, CRIM1, SH2D2A, ERN1, YPEL1, TBX21, SLC1A4, FASLG, PHACTR2, GALNT3, ADRB2, PIK3AP1, TLR3, PLEKHA5, DUSP10, GNAO1, PTGDR, FRMD4B, ANXA2, EOMES, CADM1, MAF, TPRG1, NBEAL2, PPP2R2B, PELO, SLC4A4, KLRF1, FOSL2, RGS2, TGFBR3, PRF1, MYO1F, GAB3, C17orf66, MICAL2, CYTH3, TOX, HLA-DRA, SYNE1, WEE1, PYHIN1, F2R, PLD1, THBS1, CD58, FAS, NETO2, CXCR6, ST6GALNAC2, DUSP4, AUTS2, C1orf21, KLRG1, TNIP3, GZMA, PRR5L, PRDM1, ST8SIA6, PLXND1, PTPRM, GFPT2, MYBL1, SLAMF7, FLJ16686, GNLY, ZEB2, CST7, IL18RAP, CCL5, KLRD1, and KLRB 1.

[1104] The gene set “Up TEM vs. Down TN” includes the following genes: MYO5A, MXD4, STK3, S1PR5, GLCCI1, CCR3, SOX13, KRTAP5-2, PEA15, PARP8, RNF166, UEVLD, LIMK1, SLC6A6, SV2A, KPNA2, OSBPL7, ST7, GGA2, PI4K2A, CD68, ZAK, RORA, TGFBI, DNAJC1, JOSD1, ZFYVE28, LRP8, OSBPL3, CMIP, NAT13, TGFB1, ANTXR2, NR4A3, RDX, ADCY9, CHN1, CD300A, SCD5, PTPN22, LGALS1, RASGEF1A, GCNT1, GLUL, ABCA2, CLDND1, PAM, CLCF1, MXRA7, CLSTN3, ACOT9, METRNL, BMPR1A, LRIG1, APOBEC3G, CACNB3, RNF19A, RAB27A, FADS3, ACTN4, TBKBP1, FAM53B, MAN1A1, FAM38A, GRLF1, B4GALT5, WIPI1, DUSP2, ANXA5, AHNAK, CLIC1, MAP3K5, ST8SIA1, TARP, ADAM8, MATK, SLFN12L, PIK3R3, FAM46C, ANXA2P2, CTNNA1, NPC1, SH2D2A, ERN1, YPEL1, TBX21, STOM, PHACTR2, GBP5, ADRB2, PIK3AP1, DUSP10, PTGDR, EOMES, MAF, TPRG1, NBEAL2, NCAPH, SLC4A4, FOSL2, RGS2, TGFBR3, MYO1F, C17orf66, CYTH3, WEE1, PYHIN1, F2R, THBS1, CD58, AUTS2, FAM129A, TNIP3, GZMA, PRR5L, PRDM1, PLXND1, PTPRM, GFPT2, MYBL1, SLAMF7, ZEB2, CST7, CCL5, GZMK, and KLRB1.

[1105] Other gene sets describing similar processes and/or characteristics can also be used to characterize cell phenotypes described above.

[1106] Cell Ranger VDJ was used to generate single cell VDJ sequences and annotations for each single cell 5′ library. Loupe Cell Browser software and Bioconductor packages were used for data analysis and visualization.

### Results

[1107] This example aims to compare T cell states between purified T cells which served as input cells, CART cells manufactured using the ARM process (labeled as “Day 1” cells), and CART cells manufactured using the TM process (labeled as “Day 9” cells) using single-cell RNA-seq (scRNA-seq). In addition, single-cell TCR-seq (scTCR-seq) was performed to study clonality and track cell differentiation from input to post-manufacturing materials.

[1108] As shown in FIGS. 37A-37C, input cells had the fewest expressed genes and UMIs, suggesting these cells were not transcriptionally active and were in a resting state. Day 1 and Day 9 cells were expressing more genes, with Day 9 cells being the most transcriptionally active. Similar results are shown in FIGS. 38A-38D. Input cells were not expressing proliferation genes (FIGS. 38A and 38D).

[1109] Additional gene set analysis data are shown in FIGS. 39A-39E. Different populations of cells were compared using the median gene set scores. Day 1 cells and input cells were in a younger, more stem-like memory state (FIGS. 39A-39C). In FIG. 39A, the median GeneSetScore (Up TEM vs. Down TSCM) values for Day 1 cells, Day 9 cells, and input cells are -0.084, 0.035, and -0.1, respectively. In FIG. 39B, the median GeneSetScore (Up Treg vs. Down Teff) values for Day 1 cells, Day 9 cells, and input cells are -0.082, 0.087, and -0.071, respectively. In FIG. 39C, the median GeneSetScore (Down stemness) values for Day 1 cells, Day 9 cells, and input cells are -0.062, 0.14, and -0.081, respectively.

[1110] In addition, Day 1 cells were in a more ideal metabolic state compared to Day 9 cells (FIGS. 39D and 39E). In FIG. 39D, the median GeneSetScore (Up hypoxia) values for Day 1 cells, Day 9 cells, and input cells are 0.019, 0.11, and -0.096, respectively. In FIG. 39E, the median GeneSetScore (Up autophagy) values for Day 1 cells, Day 9 cells, and input cells are 0.066, 0.11, and -0.09, respectively.

[1111] Based on gene expression, the input cells contain four clusters. Cluster 0 is characterized by high expression of LMNA, S100A4, etc. Cluster 1 is characterized by high expression of RP913, PRKCQ-AS1, etc. Cluster 2 is characterized by high expression of PR11-291B21.2, CD8B, etc. Cluster 3 is characterized by high expression of NKG7, GZMH, CCL5, CST7, GNLY, FGFBP2, GZMA, CCL4, CTSW, CD8A, etc. In a T-Distributed Stochastic Neighbor Embedding (TSNE) plot for the input cells, Cluster 3 stood out from the other cells, and Cluster 1 and Cluster 2 were hard to differentiate.

[1112] According to the gene set analysis shown in FIGS. 40A-40C, Cluster 0 and Cluster 3 were enriched for a T regulatory phenotype compared to Cluster 1 and Cluster 2 which were enriched for a T effector phenotype. Cluster 3 was dominated by late memory/effector memory (TEM) cells, Cluster 1 and Cluster 2 were early memory and naive cells, and Cluster 0 is in the middle. The majority of the input cells were in an early memory, naive state. Without wishing to be bound by theory, these cells may do the best during the manufacturing procedure.

[1113] Less transcriptional heterogeneity was seen in Day 1 cells and Day 9 cells (data not shown).

[1114] Like the input population, Day 1 cells showed a large cluster of early memory cells and a smaller cluster of late memory cells in a TSNE plot. similar to what was seen with Cluster 3 of the input cells. In contrast, Day 9 cells did not show distinct clusters of early memory cells in a TSNE plot. This implies that by day 9, the cells had become more homogeneous.

[1115] TCRs were sequenced and clonotype diversity was measured. Overall, the three clonotype profiles were very flat - most clones were only picked up once (FIGS. 41A-41C and Table 24). Shannon entropy in Table 24 measures the flatness of the distribution. The dominant clones in the input cells were late memory cells. Day 1 cells looked similar to the input cells but started to even out. By day 9, the dominate clones had substantially evened out and the distribution was much more flat. The diversity measurement was the highest at day 9 because there was a much more even and flat distribution in Day 9 cells than in the input cells or Day 1 cells.

TABLE 24

Measurements of TCR diversity

| | | | |
|---|---|---|---|
| | Input | Day 1 product | Day 9 product |
| Average clones per clonotype | 1.10 | 1.05 | 1.07 |
| Estimated number of cells | 7344 | 7687 | 7233 |
| Total number of clonotypes | 5325 | 7403 | 6736 |
| Diversity | 342.27 | 802.94 | 3382.62 |
| Normalized Shannon entropy | 9.98E-01 | 9.95E-01 | 9.96E-01 |

### Summary

[1116] There were significant T cell state differences between Day 1 and Day 9 products. Day 1 cells were much more similar to input cells and had enrichment for stemness signatures, indicating a more efficacious product.

### Example 11 Phase I, Open Label, Study of B-Cell Maturation Antigen (BCMA)-Directed CAR-T Cells in Adult Patients With Relapsed and/or Refractory Multiple Myeloma (MM)

[1117] This study evaluates the safety and tolerability of anti-BCMA CART-T cell therapy in adult MM subjects who are relapsed and/or refractory to at least two prior treatment regimens, including an IMiD (e.g. lenalidomide or pomalidomide), a proteasome inhibitor (e.g. bortezomib, carfilzomib), and an approved anti-CD38 antibody (e.g. daratumumab), if available, and have documented evidence of disease progression (IMWG criteria).

[1118] The anti-BCMA CAR comprises a PI61 anti-BCMA scFv, a CD8 hinge and transmembrane region, a 4-1BB costimulatory domain, and a CD3 zeta signaling domain. In this study, the anti-BCMA CAR-T cell products are manufactured using the Activated Rapid Manufacturing (ARM) process. Such cells are referred to as “ARM-BCMA CAR.” Specifically, T cells are enriched from a subject’s leukapheresis unit using commercially available magnetic beads capturing CD4 and CD8 co-receptors on the T cell surface. Enriched T cells are then stimulated with a colloidal polymeric nanomatrix covalently attached to humanized recombinant agonist antibodies against human CD3 and CD28. Twenty-four hours after seeding, activation and transduction, CAR-T cells are harvested and washed to remove residual non-integrated vector and non-bound activating matrix. After the wash, BCMA CART cell therapy is concentrated and cryopreserved. Results from a release testing procedure are required prior to release of the product for administration.

[1119] Compared to the TM process for CAR-T cells, which relies on an ex vivo T-cell expansion period lasting 7-8 days after transduction with lentiviral vector, the ARM process does not include ex vivo T-cell expansion. In contrast, ARM produced T cells are harvested 24 hours after gene transfer, allowing them to expand in vivo in patients. The greater in vivo T cell expansion achieved with the ARM process is predicted to result in a less differentiated T cell phenotype, preserving a greater fraction of memory stem T cells in the final cell product. The presence of less differentiated, memory CAR-T cells has been associated with improved antitumor efficacy in clinical studies (Fraietta JA, et al., (2018) Nat Med, 24(5); 563-71 ). Without wishing to be bound by theory, BCMA CART cells comprised of a greater fraction of memory T stem cells result in enhanced CAR-T cell expansion in patients, thus overcoming effector T cell exhaustion and resulting in more durable efficacy in MM patients compared with BCMA CARTs produced under traditional manufacturing processes.

[1120] The ARM process produces CAR-T cells composed of a significantly greater proportion of naive-like memory T cells (CCR7+/CD45RO-) in both the overall product and the CAR-positive fraction as compared to CART cells manufactured using the traditional manufacturing (TM) process. ARM-BCMA CAR has shown tumor eradication in preclinical MM models in a dose responsive fashion. ARM-BCMA CAR is at least five-fold more potent as compared to BCMA CAR-T cells generated with the TM process and led to extended CAR-T expansion in vivo, with higher levels of systemic cytokines. Together, these results support the hypothesis that anti-BCMA CAR-T cell products manufactured with the ARM process contain T cells with a pronounced memory stem cell phenotype, resulting in a BCMA CAR-T cell product with enhanced engraftment, expansion, and anti-MM properties.

[1121] In this phase I study, each subject is first evaluated for clinical eligibility during screening. Subjects eligible for inclusion in this study must meet all of the following criteria: (1) ≥18 years of age at the time of ICF signature; (2) ECOG performance status that is either 0 or 1 at screening; (3) subjects with MM who are relapsed and/or refractory to at least 2 prior treatment regimens, including an IMiD (e.g. lenalidomide or pomalidomide), a proteasome inhibitor (e.g. bortezomib, carfilzomib), and an approved anti-CD38 antibody (e.g. daratumumab) (if available) and have documented evidence of disease progression (IMWG criteria); (4) subjects must have measurable disease defined by at least 1 of the following 3 measurements: serum M-protein ≥ 1.0 g/dL, urine M-protein ≥ 200 mg/24 hours, or serum free light chain (sFLC) > 100 mg/L of involved FLC; (5) All patients must be suitable for serial bone marrow biopsy and/or aspirate collection according to institution’s guidelines and be willing to undergo this repeated procedure as described for this study.; (6) subjects must meet the following hematological values at screening: absolute neutrophil count (ANC) ≥ 1,000 /mm³ (≥ 1×10⁹ /L) without growth factor support within 7 days prior to testing, absolute number of CD3+ T cells > 150 /mm³ (> 0.15×10⁹ /L) without transfusion support within 7 days prior to testing, platelets ≥ 50 000/mm³ (≥ 50×10⁹ /L), and hemoglobin ≥ 8.0 g/dl (≥ 4.9 mmol/L); (7) patient must be deemed suitable by investigator to undergo fludarabine/cyclophosphamide LD regimen; and (8) must have a leukapheresis material of non-mobilized cells accepted for manufacturing. If eligible, a subject has a leukapheresis product collected and submitted for CAR-T manufacture. The subject is enrolled with the acceptance of their leukapheresis product for the start of manufacture.

[1122] Subjects receive lymphodepletion (LD) chemotherapy only after the final product has been confirmed to be available. Following LD chemotherapy, a single dose of anti-BCMA CAR-T cell product is administered via an intravenous (i.v.) injection to a subject within 90 minutes from thawing (FIG. 42). The starting dose of ARM-BCMA CAR is 1×10⁷ viable CAR-positive T cells. The dose of 5×10⁷ viable CAR-positive T cells is also tested. Each subject is hospitalized for the first 72 hours following anti-BCMA CAR-T cell administration.

[1123] For pharmacokinetic analysis, serial blood samples are collected at different time points to measure ARM-BCMA CAR cellular kinetics in peripheral blood by flow cytometry and qPCR, in bone marrow by flow cytometry and qPCR, to measure cellular and humoral immunogenicity, and to measure potential pharmacodynamic markers including sBCMA, BAFF, and APRIL, in peripheral blood by ELISA. In particular, subjects are analyzed for the amount of CAR transgene in peripheral blood, bone marrow, or other relevant tissues; the surface expression of CAR-positive T cells in the peripheral blood or bone marrow; the anti-mCAR antibodies in the serum; the percentage of IFN-γ positive CD4/CD8 T cells in PBMC; markers of immune cell activation; soluble immune factors and cytokines (e.g., sBCMA, IFN-γ, IL-2, IL-4, IL-6, IL-8, IL-10, IL-15, TNF-α), CAR-T clonality; and the levels of soluble BCMA, APRIL, and BAFF in the serum.

### Example 12 Manufacturing BCMA CART Cells Using the Activated Rapid Manufacturing (ARM) Process

[1124] The ARM process of BCMA CART cells initiates with the preparation of the media as outlined in Table 25.

[1125] Cryopreserved leukapheresis product is used as the starting material and is processed for T cell enrichment. When available, the apheresis paper work is utilized to define the T cell percentage. In the absence of the T cell percentage data on the apheresis paperwork, the sentinel vial testing is performed on incoming cryopreserved leukapheresis products to obtain T cell percentage target for the apheresis. The results for the T cell percentage determine how many bags are thawed on Day 0 of the ARM process.

TABLE 25

Media and Buffer type and point of use during BCMA CART manufacturing

| | | |
|---|---|---|
| Media Type | Source | Point of Use |
| CliniMACS® Buffer/ human serum albumin (HSA) (0.5% in working concentration) | Prepared by operator on day 0 | Day 0 Processing on Cell Wash/Separator |
| Rapid Media | Prepared by operator on day 0 | Day 0 for Cell Seeding |
| PBS/ HSA (1% or 2% in working concentration) | Prepared by operator on day 0 | Harvest and culture Wash Media (Day 1) |
| Cryostor10 (CS10) | Commercially available | Harvest Formulation |

[1126] Cryopreserved leukapheresis is thawed, washed, and then undergoes T cell selection and enrichment using CliniMACS® microbead technology. Viable nucleated cells (VNCs) are activated with TransACT (Miltenyi) and transduced with a lentiviral vector encoding the CAR. The viable cells selected with the Miltenyi microbeads are seeded into the centricult on the Prodigy®, which is a non-humidified incubation chamber. While in culture, the cells are suspended in Rapid media, which is an OpTmizer™ CTS™ based medium that contains the CTS™ Supplement (ThermoFisher), Glutamax, IL-2 and 2% Immune cell serum replacement amongst its components to promote T cell activation and transduction. Lentiviral transduction is performed once on the day of seeding after the TransACT has been added to the diluted cells in the culture media. Lentiviral vector will be thawed immediately prior to use on day of seeding for up to 30 minutes at room temperature.

[1127] From the start of the process on Day 0 to the initiation of the culture wash and harvest, BCMA CART cells are cultured for 20 - 28 hours from seeding. Following culture, the cell suspension undergoes two culture washes and one harvest wash within the centricult chamber (Miltenyi Biotech).

[1128] After the harvest wash on the CliniMACS® Prodigy® on day 1, the cell suspension is sampled to determine viable cell count and viability. Cell suspension is then transferred to a centrifuge to be pelleted manually. The supernatant is removed, and the cell pellet is resuspended in CS10 (BioLife Solution), resulting in a product formulation with a final DMSO concentration of -10.0%. The viable cell count is formulated at the end of harvest for dosing. The doses are then distributed into individual cryobags and analytical sampling into cryovials.

[1129] Cryopreserved products are stored in monitored LN2 storage tanks, in a secure, limited access area until final release and shipping.

### Example 13 Characterization of BCMA CART Cells Manufactured Using the Activated Rapid Manufacturing (ARM) Process

### Summary

[1130] This example describes characterization of BCMA CART cells manufactured using the ARM process. The ARM process produces CAR-T cells composed of a significantly greater proportion of naive-like memory T cells (CCR7+/CD45RO-) as compared to the traditional manufacturing (TM) product. In a preclinical model of multiple myeloma (MM), BCMA CART cells manufactured using the ARM process induced tumor regression in a dose-dependent manner and was up to 5-fold more efficacious in killing tumors compared to BCMA CART cells manufactured using the TM process. In addition, ARM-manufactured cells showed extended CART expansion in vivo (up to 3 folds higher Cmax and AUC0-21d) and induced higher systemic cytokines (IFN-γ by 3.5 folds) compared to TM-manufactured cells. Together, these results support the hypothesis that BCMA CART cells manufactured with the ARM process contain T cells with a pronounced memory stem cell phenotype and an enhanced in vivo expansion potential.

[1131] Using the ARM process, CAR could be stably expressed at 96h after viral addition (also referred to as 72h at post-thaw of the product). Therefore, 96h post-viral addition or 72h post-thaw is considered to be a surrogate time point for CAR expression for in vitro and in vivo activity. BCMA CART cells manufactured using the ARM process preserve a less differentiated cell population, and show higher target specific cytokine production in vitro, when compared to BCMA CART cells manufactured under the TM process.

[1132] BCMA CART cells manufactured using the ARM process demonstrated high specificity to BCMA using a commercial human plasma membrane protein array. The assay detected binding to BCMA (TNFRSF17) but no other strong, medium, or weak binders. The screen did not identify with any high confidence the presence of cross-reacting proteins of the anti-human BCMA single chain antibody variable fragment (scFv) (PI61) expressed in the BCMA CART product. Target distribution studies were performed to determine potential off-tumor on-target toxicity. Immunohistochemistry (IHC), in situ hybridization (ISH), and polymerase chain reaction (PCR) assays were utilized to examine the distribution of BCMA in normal human tissues. These analyses demonstrated that BCMA expression was limited to sites containing normal plasma cells (PCs), such as secondary lymphoid organs, bone marrow and mucosal associated lymphoid tissues. Because central nervous system (CNS) neurotoxicity has been a concern with other cell-based therapies, expression in brain was examined. No staining in the CNS was observed by immunohistochemistry using a commercially available antibody shown to be specific for BCMA nor by binding assays using a human-rabbit chimeric tool antibody containing a BCMA targeting scFv. These findings were confirmed by the absence of BCMA mRNA in these tissues as measured by in situ hybridization and PCR based splice variant analysis. BCMA CART targeting of normal PCs and BCMA-expressing plasmacytoid dendritic cells is likely to result in their depletion; however, targeting of other cell types is not anticipated.

### Results

[1133] The studies described below compared BCMA CART cells manufactured using the ARM process (referred to as “ARM-BCMA CAR”) with BCMA CART cells manufactured using the TM process (referred to as “TM-BCMA CAR” or “TM-BCMA CAR*”). The CAR expressed in ARM-BCMA CAR and the CAR expressed in TM-BCMA CAR* have the same sequence, comprising a PI61 scFv, a CD8 hinge and transmembrane region, a 4-1BB costimulatory domain, and a CD3 zeta signaling domain. The CAR expressed in TM-BCMA CAR comprises a BCMA10 scFv, a CD8 hinge and transmembrane region, a 4-1BB costimulatory domain, and a CD3 zeta signaling domain.

### ARM-BCMA CAR Expression Kinetics In Vitro

[1134] In contrast to TM which measures lentiviral integration of the CAR transgene after 8-9 days, in the ARM process, the lentiviral transgene may not be fully integrated and truly expressed within 24h post lentiviral addition, as lentiviral pseudotransduction could occur (Haas DL, et al., (2000) Mol Ther; 2(1):71-80; Galla M, et al., (2004) Mol Cell; 16(2):309-15). Therefore, the BCMA-CAR expression pattern was evaluated over time by extended culturing of ARM-BCMA CAR in vitro in the presence or absence of 3′-azido-3′-deoxythymidine (AZT) to evaluate the potential pseudotransduction versus stable integration and expression of the CAR transgene. Flow cytometry (FACS) analyses were performed to detect CAR surface expression at 24 h, 48 h, 72 h, 96 h and 168 h post T cell activation and transduction with the lentiviral vector. In some cases, ARM-BCMA CAR and an aliquot of this product were frozen down immediately upon harvest for additional characterization in other assays.

[1135] As shown in FIG. 43, FACS analyses indicate that the BCMA-CAR revealed practically no expression at 24 h after the addition of the lentiviral vector. However, the CAR+ population initially emerged at 48 h. The CAR+ population slightly increased at each time point from 48 h to 168 h after viral addition. CAR seemed to be stably expressed starting from 96h. This contrasts with the untransduced (UTD) and AZT treated samples, which showed no CAR+ population at any time point from 48 h (FIG. 43). AZT was able to effectively inhibit CAR expression at both the 30 µM and 100 µM doses, suggesting that BCMA-CAR expression is due to viral gene integration into the host cell genome and unlikely a consequence of lentiviral pseudo-transduction.

### ARM-BCMA CAR Preserves T Cell Stemness

[1136] ARM-BCMA CAR and TM-BCMA CAR were analyzed by FACS to evaluate CAR expression at thaw, as well as the T-cell phenotype at 48h post thaw (FIGS. 44A and 44B). BCMA-CAR was almost undetectable at thaw seen in two donors (FIG. 44A), which is consistent with the observation in the CAR expression kinetics study shown in FIG. 43. However, at 48 h post-thaw, BCMA-CAR expression was 32.9% for ARM-BCMA CAR. In contrast, TM-BCMA CAR revealed BCMA-CAR expression of 7% (FIG. 44B). Analysis of the CAR+ T-cell phenotype revealed that the ARM process retained naive-like T cells (60% CD45RO-/CCR7+), which proved to be 26 folds more than the effector memory T cell population (CD45RO+/CCR7-). The TM process mainly resulted in central-memory T cells (81% CD45RO+/CCR7+) within CAR+ T cells. The naive-like T cell population was nearly absent with the TM process. This naive T-cell population largely overlaps with CD45RO-/CD27+ Tstem cells (described by Cohen AD, et al., (2019) J Clin Invest; 129(6):2210-21; and Fraietta, et al (2018) Nat Med, 24(5); 563-571) and is associated with enhanced CAR-T expansion and clinical responses.

[1137] In addition to its phenotype, the final ARM-BCMA CAR cell product was also assessed for its activation in vitro. ARM-BCMA CAR and TM-BCMA CAR were thawed and co-cultured with the BCMA-expressing cell line KMS-11. Post-thaw ARM-BCMA CAR cells were rested for 24 h prior to co-culture being established. Comparing cytokine levels in the supernatants 24 hours after co-culture revealed a 5-fold increase of IL-2 and a 2-fold increase in levels of IFN-γ secreted by ARM-BCMA CAR as compared to TM-BCMA CAR as shown in FIGS. 45A and 45B. Experiments with UTD cells that underwent the ARM or TM process confirmed BCMA-specific recognition by ARM-BCMA CAR and TM-BCMA CAR. However, the higher background of IFN-γ secretion by ARM-UTD in the absence of BCMA-specific stimulation (FIG. 45B) is likely due to the activated nature of the ARM products.

[1138] In summary, the ARM process used to generate BCMA CART cells results in T cells with CAR-expression higher than that of the TM process. ARM-BCMA CAR demonstrates BCMA-specific activation in vitro and secretes higher levels of IL-2 as compared to TM-BCMA CAR, which correlates with its Tstem phenotype.

### Efficacy of ARM-BCMA CAR and TM-BCMA CAR in a Xenograft Model

[1139] Pharmacology studies in vivo were used to guide the development of ARM-BCMA CAR. For the experiment described in FIG. 46, ARM-BCMA CAR was generated with GMP material. In parallel, TM-BCMA CAR was made using the same batch of T cells but with TM. For dose calculation using ARM-BCMA CAR, the measurement of % CAR+ at 72 h post-thaw of product was used to calculate the dose; while for TM-BCMA CAR, % CAR+ on day 9 TM products was used to calculate the dose. The efficacy of CAR-T cells generated using the different processes was evaluated in immunodeficient NSG mice (NOD-scid IL2Rg-null), which were inoculated with the MM cell line KMS-11-Luc. This tumor cell line engrafts in the bone marrow. Eight days after MM inoculation, cohorts of mice received a single infusion of CAR+ T cells. Doses were normalized to total CAR-T cells for the matched dose group. UTD T cells were prepared similarly and given as an independent group to control for allogeneic response to the tumor. The UTD dose reflected the highest total T cell dose of the respective process we could achieve for both TM and ARM.

TABLE 26

Summary of the study design for different dose groups, and time points for blood pharmacokinetic (PK) and plasma cytokine measurement

| | | | |
|---|---|---|---|
| Cell process | Group/arm | CAR+ product/mouse | Blood cellular kinetics and plasma cytokine post CAR-T injection |
| | PBS | | Cytokines: Day 2, 7, 14, and 21 PK: Day 7, 14, and 21 |
| ARM | UTD | | |
| | ARM-BCMA CAR | 1.5e⁵ | |
| | ARM-BCMA CAR | 5e⁴ | |
| | ARM-BCMA CAR | 1e⁴ | |
| TM | UTD | | |
| | TM-BCMA CAR | 5e⁵ | |
| | TM-BCMA CAR | 1.5e⁵ | |
| | TM-BCMA CAR | 5e⁴ | |

[1140] FIG. 47 is the tumor regression curve for all the groups. Both BCMA CAR-T products (ARM-BCMA CAR and TM-BCMA CAR) were able to eliminate tumor at the tested dose levels, even at the lowest dose group. Tumor-regression was induced in a dose-dependent manner. The on-set of effect in tumor-killing was delayed for about a week at the low dose group compared to the high dose group. ARM-BCMA CAR induced similar tumor regression at doses 3-5 folds lower than TM-BCMA CAR, indicating that ARM-BCMA CAR is 3-5 folds more potent compared to TM-BCMA CAR in tumor-killing.

[1141] Moreover, in this study, the efficacy of TM-BCMA CAR* was also evaluated. TM-BCMA CAR* and ARM-BCMA CAR expressed the same anti-BCMA CAR, but were manufactured using different processes: the TM process and the ARM process, respectively. The results demonstrated that ARM-BCMA CAR induced similar tumor regression at doses 1-5 folds lower than TM-BCMA CAR*.

[1142] All mice were bled at day 2, 7, 14, and 21 post CAR-T therapy to measure plasma IFN-₇ (FIGS. 48A-48C). No early peak was observed and all groups showed very low level of circulating IFN-γ (<10 pg/ml) at day 2. Peaks for all the groups were observed within 14 days post CAR-T dose. However, IFN-γ levels were 3.5-fold higher for ARM-BCMA CAR compared to TM-BCMA CAR. ARM-UTD groups produce little or no IFN-γ at day 2 and day 7 prior to study termination. IFN-γ declined in the higher dose groups at day 21, when compared to the ARM-BCMA CAR 1e4 and TM-BCMA CAR 5e4groups as the CAR+T cells were still expanding with delayed tumor inhibition in these two groups.

### In Vivo ARM-BCMA CAR Cellular Kinetics

[1143] As part of this pharmacology study to assess efficacy in NSG mice, the expansion of peripheral blood CAR-T cells was analyzed by FACS up to 3 weeks after infusion. Both CD3+ T cell and CAR+ T cell expansion were observed in all CAR-T treated groups. There was no clear dose-dependent expansion for ARM-BCMA CAR or TM-BCMA CAR with respect to Cmax or AUC0-21d. The peak of cellular expansion for ARM-BCMA CAR or MTV273 was not achieved within 21 days. However, TM-BCMA CAR at dose group of 5e5 and ARM-BCMA CAR at dose group of 0.5e5 achieved apparent peak expansion at day 14 (FIG. 49). Comparing the expansion of ARM-BCMA CAR with that of TM-BCMA CAR in 21 days, both Cmax and AUC0-21d of ARM-BCMA CAR were 2 to 3 times higher.

### Example 14 Manufacturing BCMA CART Cells Using the Activated Rapid Manufacturing (ARM) process using IL-15 or hetIL-15 (IL-15/sIL-15Ra)

[1144] The ARM process of BCMA CART cells initiates with the preparation of the media as outlined in Table 25.

[1145] Cryopreserved leukapheresis product is used as the starting material and is processed for T cell enrichment. When available, the apheresis paper work is utilized to define the T cell percentage. In the absence of the T cell percentage data on the apheresis paperwork, the sentinel vial testing is performed on incoming cryopreserved leukapheresis products to obtain T cell percentage target for the apheresis. The results for the T cell percentage determine how many bags are thawed on Day 0 of the ARM process.

[1146] Cryopreserved leukapheresis is thawed, washed, and then undergoes T cell selection and enrichment using CliniMACS® microbead technology. Viable nucleated cells (VNCs) are activated with TransACT (Miltenyi) and transduced with a lentiviral vector encoding the CAR. The viable cells selected with the Miltenyi microbeads are seeded into the centricult on the Prodigy®, which is a non-humidified incubation chamber. While in culture, the cells are suspended in Rapid media, which is an OpTmizer™ CTS™ based medium that contains the CTS™ Supplement (ThermoFisher), Glutamax, IL-15 or hetIL-15 (IL-15/sIL-15Ra), and 2% Immune cell serum replacement amongst its components to promote T cell activation and transduction. Lentiviral transduction is performed once on the day of seeding after the TransACT has been added to the diluted cells in the culture media. Lentiviral vector will be thawed immediately prior to use on day of seeding for up to 30 minutes at room temperature.

[1147] From the start of the process on Day 0 to the initiation of the culture wash and harvest, BCMA CART cells are cultured for 20 - 28 hours from seeding. Following culture, the cell suspension undergoes two culture washes and one harvest wash within the centricult chamber (Miltenyi Biotech).

[1148] After the harvest wash on the CliniMACS® Prodigy® on day 1, the cell suspension is sampled to determine viable cell count and viability. Cell suspension is then transferred to a centrifuge to be pelleted manually. The supernatant is removed, and the cell pellet is resuspended in CS10 (BioLife Solution), resulting in a product formulation with a final DMSO concentration of -10.0%. The viable cell count is formulated at the end of harvest for dosing. The doses are then distributed into individual cryobags and analytical sampling into cryovials.

[1149] Cryopreserved products are stored in monitored LN2 storage tanks, in a secure, limited access area until final release and shipping.

[1150] In some embodiments, IL-15 or hetIL-15 used in the OpTmizer™ CTS™ based medium can be replaced with IL-6 or IL-6/sIL-6Ra.

### Example 15 Manufacturing CD19 CART Cells Using the Activated Rapid Manufacturing (ARM) Process

[1151] The ARM process of CD19 CART cells initiates with the preparation of the media as outlined in Table 25.

[1152] Cryopreserved leukapheresis product is used as the starting material and is processed for T cell enrichment. When available, the apheresis paper work is utilized to define the T cell percentage. In the absence of the T cell percentage data on the apheresis paperwork, the sentinel vial testing is performed on incoming cryopreserved leukapheresis products to obtain T cell percentage target for the apheresis. The results for the T cell percentage determine how many bags are thawed on Day 0 of the ARM process.

[1153] Cryopreserved leukapheresis is thawed, washed, and then undergoes T cell selection and enrichment using CliniMACS® microbead technology. Viable nucleated cells (VNCs) are activated with TransACT (Miltenyi) and transduced with a lentiviral vector encoding the CAR. The viable cells selected with the Miltenyi microbeads are seeded into the centricult on the Prodigy®, which is a non-humidified incubation chamber. While in culture, the cells are suspended in Rapid media, which is an OpTmizer™ CTS™ based medium that contains the CTS™ Supplement (ThermoFisher), Glutamax, IL-2 and 2% Immune cell serum replacement amongst its components to promote T cell activation and transduction. Lentiviral transduction is performed once on the day of seeding after the TransACT has been added to the diluted cells in the culture media. Lentiviral vector will be thawed immediately prior to use on day of seeding for up to 30 minutes at room temperature.

[1154] From the start of the process on Day 0 to the initiation of the culture wash and harvest, CD19 CART cells are cultured for 20 - 28 hours from seeding. Following culture, the cell suspension undergoes two culture washes and one harvest wash within the centricult chamber (Miltenyi Biotech).

[1155] After the harvest wash on the CliniMACS® Prodigy® on day 1, the cell suspension is sampled to determine viable cell count and viability. Cell suspension is then transferred to a centrifuge to be pelleted manually. The supernatant is removed, and the cell pellet is resuspended in CS10 (BioLife Solution), resulting in a product formulation with a final DMSO concentration of -10.0%. The viable cell count is formulated at the end of harvest for dosing. The doses are then distributed into individual cryobags and analytical sampling into cryovials.

[1156] Cryopreserved products are stored in monitored LN2 storage tanks, in a secure, limited access area until final release and shipping.

[1157] In some embodiments, IL-2 used in the OpTmizer™ CTS™ based medium can be replaced with IL-15, hetIL-15 (IL-15/sIL-15Ra), IL-6, or IL-6/sIL-6Ra.

### Example 16 CAR T-Cell Activation With Multispecific Binding Molecules

[1158] A variety of configurations of bispecific antibodies and multimer conjugates thereof were generated. Schema for these conjugates are provided in FIGS. 51A-51B (Constructs 1-17, also referred to as F1 to F17).

[1159] To characterize T cell activation and lentiviral transduction, T cells were seeded at varying concentrations into a 96 well plate in supplemented media. Reagents comprising Constructs 1 through 17 in FIGS. 51A-51B at various concentrations were used to stimulate T cells for 30 minutes. Miltenyi TransAct at the optimal titrated concentration was used as a positive control. The stimulated T cells were then treated with lentivirus comprising a vector encoding a CD19 CAR at an MOI targeting 20% transduction. After culturing the cells, 75% of the culture was removed for FACS analysis. The remaining 25% was cultured and analyzed by FACS once more. The cells were analyzed by Celigo imaging, IFN gamma and IL-2 analysis of the supernatant, and FACS to assess successful CD19 CAR transduction. FIG. 52 shows the resulting T cell clustering.

### Example 17 Characterization of CAR T-Cells Activated With Multispecific Binding Molecules

[1160] T cells isolated from three different donors were seeded into a 96 well plate in supplemented media. Reagents comprising Constructs 1 through 17 in FIGS. 51A-51B at various concentrations were used to stimulate T cells. Miltenyi TransAct at the optimal titrated concentration was used as a positive control. The stimulated T cells were then treated with lentivirus comprising a vector encoding a CD19 CAR at an MOI targeting 20% transduction. Supernatants were removed 24 hours after stimulation for Meso Scale Discovery (MSD). For CAR expression measurement, the cells were taken 3.5 days post virus addition. The cells were analyzed by Celigo imaging, 10-plex cytokine analysis of the supernatant, and FACS to assess successful CD19 CAR transduction.

[1161] Greater than 70% cell viability was seen in the majority of constructs, although Formats 1 and 10 showed reduced viability under some conditions. Constructs 1-5, 7, 12, 13, 15, and 16 showed greater than 20% CAR transduction, averaged across three donors (FIG. 54). Multimeric constructs showed bell-shaped transduction. Reduced transduction was seen in T cells stimulated with CD3 only constructs, Constructs 14 and 17. The day 1 MSD data is provided in FIG. 53.

### Example 18 In Vitro Assessment of CAR T-Cells Manufactured With Multispecific Binding Molecules

[1162] T cells were activated with reagents comprising Constructs 1, 2, 3, 4, 5, 7, 12, 13, 15, 16 or TransAct at various concentrations and transduced with a lentivirus comprising a vector encoding a CD19 CAR at an MOI targeting 20% transduction for 24 hours. The cells were washed, phenotyped, and frozen. T cells were later thawed and assessed for recovery and viability on the same day, post-thaw. Post-thaw, T cells were analyzed for phenotype and CAR transduction, and cytokine profiles and killing assay readouts in Nalm6 WT and Nalm6 CD19 KO were obtained.

[1163] In one study, the cells were washed and half of the cells were taken for flow staining and half of the cells were plated back and incubated for 3 days. The cells were stained on the fourth day for CAR expression. In other studies, the cells were thawed later and plated with luciferized target cells at CART cells: Target cells ratios between 0.6:1 and 5:1, for 24 hours. For the study shown in FIGS. 57A-57B, a CART cell: Target cell ration of 2.5:1 was used. After 24 hours, the luciferase signal was measured as a proxy for target cell viability. This was used to calculate the effective killing ability of the CAR T cells.

[1164] As show in FIG. 55, F1, F3, F5, and F4, all of which have a ligand valency of 2, showed higher activity than multimer constructs. CD-2 targeting constructs showed enhanced transduction across the 0.1 to 10 µg/mL concentrations. FIGS. 56A-56D further demonstrate that the resulting CAR T-cells show specific killing of CD19+ cells. Per FIGS. 57A-57B, the resulting CAR T-cells also secrete cytokines in an antigen specific manner.

### Example 19 In Vivo Assessment of CAR T-cells Manufactured With Multispecific Binding Molecules

[1165] T cells from two donors were activated with reagents comprising Constructs 3 and 4 or TransAct and transduced with a lentivirus comprising a vector encoding CAR at an MOI of 1, targeting 20% transduction for 24 hours. The cells were washed, phenotyped, assessed for cytokine production, and frozen. T cells were later thawed and assessed for recovery and viability on the same day, post-thaw. Post-thaw, T cells were cultured for 3 additional days and analyzed for CAR transduction.

[1166] Anti-tumor activity of a set of CD19 targeting CAR T cells activated with Construct 3, 4 or TransAct was also assessed in vivo in a NALM6 xenograft model.

[1167] Details of the model and protocol are provided below.

[1168] Cell Line – Nalm6 (RRID: CVCL_0092) is a human acute lymphoblastic leukemia (ALL) cell line. Cells were grown in RPMI medium containing 10% fetal bovine serum in suspension. These cells persist and expand in mice when implanted intravenously. Cells were modified to express luciferase, so that tumor cell growth can also be monitored by imaging the mice after they have been injected with the substrate Luciferin.

[1169] Mice - 6 week old NSG (NOD.Cg-PrkdcscidIl2rgtm1Wjl/SzJ) mice were received from the Jackson Laboratory

[1170] Protocol – Nalm6 cells were injected into the mice. Nalm6 cells endogenously express CD19 and thus, are used to test the efficacy of CD19-directed CAR T cells in vivo. Mice were dosed after tumor implantation, with CAR T cells for the treatment of Nalm6. The CARTs were injected into the mice. Five mice per group were treated with PBS alone (PBS), untransduced T cells treated with TransAct, F3 or F4 STARTERS, or CAR T cells manufactured using F3, F4 or TransAct. All cells were prepared in parallel. The health status of the mice was monitored daily, including twice weekly body weight measurements. The percent change in body weight was calculated as (BWcurrent - BWinitial)/(BWinitial) × 100%. Tumors were monitored 2 times weekly by imaging the mice.

[1171] As shown in FIG. 58, the resulting CD19 CAR T-cells were able to clear high in vivo tumor burdens and were comparable to TransAct for both Constructs 3 (F3) and 4 (F4). The CD19 CAR T-cells generated with Constructs 3 (F3) and 4 (F4) were also found to undergo expansion in vivo (FIG. 59).

[1172] In one study, cryopreserved donor cells were thawed into opTmizer media and plated. Vector and stimulation reagent were added and incubated for 24 hours. The cells were washed and 50% of the cells were cryopreserved, 25% were stained for flow and 25% of the cells were plated back and incubated for 3 days. The cells were stained on the fourth day for CAR expression. The cryopreserved portion of the cells were thawed later into media and counted. Then they were resuspended in PBS and injected into mice, with previously injected luciferized tumor. The luciferase signal and the number of CART cells in peripheral blood were measured every week for efficacy.

[1173] As shown in FIGS. 60A-60D, CART cells generated using Construct F3 or F4 showed anti-tumor activity and in vivo expansion.

### Example 20 In Vivo Efficacy of CAR T-cells Manufactured With Tet2 shRNA

[1174] Using either the expansion or expansion-less manufacturing processes described herein, CAR T-cells are generated – with or without the introduction of Tet2 shRNA. In some iterations, the Tet2 shRNA is provided in the same vector as the CAR. In some iterations, the Tet2 shRNA is provided in a different vector from the CAR; in these instances, the Tet2 shRNA vector further comprises a detectable tag. In some iterations, the CAR is CD19, BCMA, CD20, CD22, CLL-1, or EGFRvIII specific. The CAR T-cells are then frozen. CAR T-cells are thawed and administered to a TMD8 mouse model. Mice are measured and weighed twice a week after tumor implantation. Plasma samples from the mice are analyzed via FACS. Bone marrow, spleen, and tumor are collected for T-cell phenotyping, and cytokine production is measured. CAR T-cells manufactured with Tet2 shRNA are found to have better anti-tumor effect and proliferation compared to the controls.

### Example 21 Boosting Transduction

[1175] Using the expansion-less manufacturing process described herein and further adding vectofusin-1, F108, or lentiboost during transduction, CART cells were generated and analyzed for %transduction at various concentrations and time points. F108 was found to boost lentiviral transduction. Additional reagents F68, F127, protamine sulfate, and polybrene are tested in the same process. In some iterations, the CAR encoded in the vector for transduction is CD19, BCMA, CD20, CD22, CLL-1, or EGFRvIII specific.

### Example 22 Second Generation Stimulatory Constructs

[1176] This example describes characterization of second generation stimulatory constructs. As shown in FIG. 61A, constructs were generated to test binders targeting different costimulatory molecules (e.g., CD25, IL6Rb, CD27, 41BB, ICOS, or CD2). In addition, different anti-CD3 binders (binders based on ANTI-CD3 (1) or ANTI-CD3 (2)) were also compared. All the second generation stimulatory constructs have the configuration shown in FIG. 61B. The sequences of the different binders tested in this Example can be found in Table 27.

[1177] In one study, the second generation constructs were compared for transduction efficiency. TransAct was used as a control. Briefly, cryopreserved donor cells were thawed into optimizer media and plated. Vector and stimulation reagent were added and incubated for 24 hours. The cells were washed and 50% of the cells were taken for flow staining and 50% of the cells were plated back and incubated for 3 days. The cells were stained on the fourth day for CAR expression.

[1178] As shown in FIG. 62, F5 ICOS was highly effective at 0.01 µg/mL and its transduction efficiency decreased when F5 ICOS concentration was increased. F5 (the construct with the ANTI-CD3 (1)-based anti-CD3 binder) was more potent than F5 ANTI-CD3 (2) (the construct with the ANTI-CD3 (2)-based anti-CD3 binder).

### Example 23 Third Generation Stimulatory Constructs

[1179] Without wishing to be bound by theory, reducing the binding of stimulatory constructs to FcR may decrease or prevent unwanted killing of FcR-expressing cells by T cells. Third generation stimulatory constructs were generated by introducing D265A/N297A/P329A substitutions (EU numbering according to Kabat) (“DANAPA”) in the IgG1 Fc region of the stimulatory constructs. In addition, different anti-CD3 binders (binders based on ANTI-CD3 (1), ANTI-CD3 (2), or ANTI-CD3 (3)) and different anti-CD28 binders (binders based on ANTI-CD28 (1) or ANTI-CD28 (2)) were also compared (FIG. 63A). All the third generation stimulatory constructs have the configuration shown in FIG. 63B. The sequences of the different binders tested in this Example can be found in Table 27.

[1180] In one study, the third generation constructs were compared for transduction efficiency. Briefly, cryopreserved donor cells were thawed into opTmizer media and plated. Vector and stimulation reagent were added and incubated for 24 hours. The cells were washed and 50% of the cells were taken for flow staining and 50% of the cells were plated back and incubated for 3 days. The cells were stained on the fourth day for CAR expression.

[1181] As shown in FIG. 64, all the anti-CD3/CD28 or anti-CD3/CD2 constructs tested promoted CAR transduction.

[1182] In another study, the third generation constructs were compared for specific versus non-specific killing. Briefly, cryopreserved donor cells were thawed into opTmizer media and plated. Vector and stimulation reagents were added and incubated for 24 hours. The cells were washed and 50% of the cells were cryopreserved, 25% of the cells were stained for flow cytometry and 25% of the cells were plated back and incubated for 3 days. The cells were stained on the fourth day for CAR expression. The cryopreserved cells were thawed later and plated with luciferized target tumor cells and non-target tumor cells at CART cells: tumor cells ratios between 0.6:1 and 5:1, e.g., 1:5, for 24 hours. After 24 hours, the luciferase signal was measured as a proxy for target cell viability. This was used to calculate the specific and non-specific killing ability of the CAR T cells.

[1183] Silenced formats of F3 and F4 (F3 and F4 with DANAPA substitutions in the Fc region), NEG2042 and NEG2043, showed equivalent killing of target cells (FIG. 65A) but do not show non-specific killing of non-target cells (FIG. 65B). In contrast, F3 and F4 with the wild type Fc region showed non-specific killing of FcyR-expressing cells (FIG. 65B).

[1184] In another study, the third generation construct NEG2043 was used to generate cells expressing two CARs. In a first study, cryopreserved donor T cells were thawed into OpTmizer media and co-incubated for 24 hours with stimulation reagent and two vectors: a first vector encoding a CD19-targeting CAR, and a second vector encoding a BCMA-targeting CAR. After 24 hours, the cells were washed; 50% of the cells were stained for flow cytometry and 50% of the cells were replated and incubated for additional 3 days. Cells were stained for CAR expression on the fourth day. In a second study, cryopreserved donor leukapheresis was thawed, washed, and enriched for T cells using the CliniMACS Prodigy. The enriched cells were eluted into OpTmizer media. The enriched cells were co-incubated for 24 hours with stimulation reagent and a vector encoding both a CD19-targeting CAR and a CD22-targeting CAR. After 24 hours, the cells were washed; 50% of the cells were stained for flow cytometry and 50% of the cells were replated and incubated for an additional 3-6 days. Cells were stained for CAR expression on the fourth and seventh days.

[1185] F4 and the silenced format of F4 (NEG2043) were capable of expressing one or both CARs when T cells were (1) co-transduced with two CAR-encoding vectors or (2) transduced with a single vector encoding two CARs. FIG. 66A shows co-transduction of a first vector encoding a CD19-targeting CAR, and a second vector encoding a BCMA-targeting CAR. FIG. 66B shows transduction of a single vector encoding both a CD19-targeting CAR and a CD22-targeting CAR.

### EQUIVALENTS

[1186] The disclosures of each and every patent, patent application, and publication cited herein are hereby incorporated herein by reference in their entirety. While this invention has been disclosed with reference to certain embodiments, it is apparent that further embodiments and variations of this invention may be devised by others skilled in the art without departing from the true spirit and scope of the invention. The appended claims are intended to be construed to include all such embodiments and equivalent variations.

What is claimed is:

1. A method of making a population of cells (for example, T cells) that express a chimeric antigen receptor (CAR), the method comprising:
(i) contacting (for example, binding) a population of cells (for example, T cells, for example, T cells isolated from a frozen or fresh leukapheresis product) with a multispecific binding molecule comprising (A) an anti-CD3 binding domain, and (B) a costimulatory molecule binding domain (e.g., an anti-CD2 binding domain or an anti-CD28 binding domain);
(ii) contacting the population of cells (for example, T cells) with a nucleic acid molecule (for example, a DNA or RNA molecule) encoding the CAR, thereby providing a population of cells (for example, T cells) comprising the nucleic acid molecule, and
(iii) harvesting the population of cells (for example, T cells) for storage (for example, reformulating the population of cells in cryopreservation media) or administration, wherein:
(a) step (ii) is performed together with step (i) or no later than 20 hours after the beginning of step (i), for example, no later than 12, 13, 14, 15, 16, 17, or 18 hours after the beginning of step (i), for example, no later than 18 hours after the beginning of step (i), and
step (iii) is performed no later than 30 (for example, 26) hours after the beginning of step (i), for example, no later than 22, 23, 24, 25, 26, 27, 28, 29, or 30 hours after the beginning of step (i), for example, no later than 24 hours after the beginning of step (i),
(b) step (ii) is performed together with step (i) or no later than 20 hours after the beginning of step (i), for example, no later than 12, 13, 14, 15, 16, 17, or 18 hours after the beginning of step (i), for example, no later than 18 hours after the beginning of step (i), and
step (iii) is performed no later than 30 hours after the beginning of step (ii), for example, no later than 22, 23, 24, 25, 26, 27, 28, 29, or 30 hours after the beginning of step (ii), or
(c) the population of cells from step (iii) are not expanded, or expanded by no more than 5, 10, 15, 20, 25, 30, 35, or 40%, for example, no more than 10%, for example, as assessed by the number of living cells, compared to the population of cells at the beginning of step (i),
optionally wherein the nucleic acid molecule in step (ii) is on a viral vector, optionally wherein the nucleic acid molecule in step (ii) is an RNA molecule on a viral vector, optionally wherein step (ii) comprises transducing the population of cells (for example, T cells) with a viral vector comprising a nucleic acid molecule encoding the CAR.

2. The method of claim 1, wherein:
(i) the anti-CD3 binding domain, e.g., an anti-CD3 scFv, is situated N-terminal of the costimulatory molecule binding domain, e.g., an anti-CD2 Fab or an anti-CD28 Fab; or
(ii) the anti-CD3 binding domain, e.g., an anti-CD3 scFv, is situated C-terminal of the costimulatory molecule binding domain, e.g., an anti-CD2 Fab or an anti-CD28 Fab, optionally wherein:
an Fc region is situated between the anti-CD3 binding domain and the costimulatory molecule binding domain; or
the multispecific binding molecule comprises a CH2, and the anti-CD3 binding domain is situated N-terminal of the CH2.

3. The method of claim 1 or 2, wherein the multispecific binding molecule comprises:
(i) a first polypeptide comprising from N-terminal to C-terminal: VH of the anti-CD3 binding domain, VL of the anti-CD3 binding domain, VH of the costimulatory molecule binding domain, CH1, CH2, and CH3; and
(ii) a second polypeptide comprising from N-terminal to C-terminal: VL of the costimulatory molecule binding domain and CL.

4. The method of claim 1 or 2, wherein the multispecific binding molecule comprises:
(i) a first polypeptide comprising from N-terminal to C-terminal: VH of the costimulatory molecule binding domain, CH1, CH2, CH3, VH of the anti-CD3 binding domain, and VL of the anti-CD3 binding domain; and
(ii) a second polypeptide comprising from N-terminal to C-terminal: VL of the costimulatory molecule binding domain and CL.

5. The method of claim 1 or 2, wherein the multispecific binding molecule comprises:
(i) a first polypeptide comprising from N-terminal to C-terminal: VH of the costimulatory molecule binding domain, CH1, VH of the anti-CD3 binding domain, VL of the anti-CD3 binding domain, CH2, and CH3; and
(ii) a second polypeptide comprising from N-terminal to C-terminal: VL of the costimulatory molecule binding domain and CL.

6. The method of any one of claims 1-5, wherein the anti-CD3 binding domain comprises an scFv and the costimulatory molecule binding domain is part of a Fab fragment.

7. The method of any one of claims 1-6, wherein the anti-CD3 binding domain comprises:
(i) a variable heavy chain region (VH) comprising a heavy chain complementarity determining region 1 (HCDR1), a HCDR2, and a HCDR3, and a light chain variable region (VL) comprising a light chain complementarity determining region 1 (LCDR1), a LCDR2, and a LCDR3 of an anti-CD3 antibody molecule of Table 27 (for example the anti-CD3 (1), anti-CD3 (2), anti-CD3 (3), or anti-CD3 (4)); and/or
(ii) the amino acid sequence of any VH and/or VL region of an anti-CD3 antibody molecule provided in Table 27 (for example the anti-CD3 (1), anti-CD3 (2), anti-CD3 (3), or anti-CD3 (4)), or an amino acid sequence at least 95% identical thereto.

8. The method of any one of claims 1-7, wherein the costimulatory molecule binding domain is an anti-CD2 binding domain, optionally wherein the anti-CD2 binding domain comprises:
(i) a VH comprising a HCDR1, a HCDR2, and a HCDR3, and a VL comprising a LCDR1, a LCDR2, and a LCDR3 of an anti-CD2 antibody molecule of Table 27 (for example the anti-CD2 (1)); and/or
(ii) the amino acid sequence of any VH and/or VL region of an anti-CD2 antibody molecule provided in Table 27 (for example the anti-CD2 (1)), or an amino acid sequence at least 95% identical thereto.

9. The method of any one of claims 1-8, wherein the costimulatory molecule binding domain is an anti-CD28 binding domain, optionally wherein the anti-CD28 binding domain comprises:
(i) a VH comprising a HCDR1, a HCDR2, and a HCDR3, and a VL comprising a LCDR1, a LCDR2, and a LCDR3 of an anti-CD28 antibody molecule of Table 27 (for example the anti-CD28 (1) or anti-CD28 (2)); and/or
(ii) the amino acid sequence of any VH and/or VL region of an anti-CD28 antibody molecule provided in Table 27 (for example the anti-CD28 (1) or anti-CD28 (2)), or an amino acid sequence at least 95% identical thereto.

10. The method of any one of claims 1-9, wherein the anti-CD3 binding domain comprises:
(i) an scFv;
(ii) a VH linked to a VL by a peptide linker, e.g., a glycine-serine linker, e.g., a (G₄S)₄ linker; or
(iii) a VH and a VL, wherein the VH is N-terminal of the VL.

11. The method of any one of claims 1-10, wherein the costimulatory molecule binding domain is part of a Fab fragment, e.g., a Fab fragment that is part of a polypeptide sequence that comprises an Fc domain, optionally wherein the Fc domain comprises an amino acid sequence provided in Table 28, or a sequence with at least 95% sequence identity to an amino acid sequence of an Fc domain provided in Table 28.

12. The method of any one of claims 1-11, wherein the anti-CD3 binding domain is situated N-terminal of the costimulatory molecule binding domain, optionally wherein the anti-CD3 binding domain is linked to the costimulatory molecule binding domain by a peptide linker, e.g., a glycine-serine linker, e.g., a (G₄S)₄ linker.

13. The method of any one of claims 1-11, wherein the anti-CD3 binding domain is situated C-terminal of the costimulatory molecule binding domain.

14. The method of claim 13, wherein:
(i) an Fc region is situated between the anti-CD3 binding domain and the costimulatory molecule binding domain; and/or
(ii) the multispecific binding molecule comprises one or both of a CH2 and a CH3, optionally wherein the anti-CD3 binding domain is linked to the CH3 by a peptide linker, e.g., a glycine-serine linker, e.g., a (G₄S)₄ linker.

15. The method of claim 13, wherein:
(i) the multispecific binding molecule comprises a CH2, and the anti-CD3 binding domain is situated N-terminal of the CH2;
(ii) the anti-CD3 binding domain is linked to a CH1 by a peptide linker, e.g., a glycine-serine linker, e.g., a (G₄S)₂ linker; and/or
(iii) the anti-CD3 binding domain is linked to a CH2 by a peptide linker, e.g., a glycine-serine linker, e.g., a (G₄S)₄ linker.

16. The method of any one of claims 1-15, wherein the multispecific binding molecule comprises:
(i) the amino acid sequence of any heavy chain provided in Table 28, or an amino acid sequence with at least 95% sequence identity thereto; and/or
(ii) the amino acid sequence of any light chain provided in Table 28, or an amino acid sequence with at least 95% sequence identity thereto.

17. The method of any one of claims 1-16, wherein step (i) increases the percentage of CAR-expressing cells in the population of cells from step (iii), for example, the population of cells from step (iii) shows a higher percentage of CAR-expressing cells (for example, at least 10, 20, 30, 40, 50, or 60% higher), compared with cells made by an otherwise similar method without step (i).

18. The method of any one of claims 1-17, wherein:
(a) the percentage of naive cells, for example, naive T cells, for example, CD45RA+ CD45RO- CCR7+ T cells, in the population of cells from step (iii) is the same as or differs by no more than 5 or 10% from the percentage of naive cells, for example, naive T cells, for example, CD45RA+ CD45RO- CCR7+ cells, in the population of cells at the beginning of step (i);
(b) the percentage of naive cells, for example, naive T cells, for example, CD45RA+ CD45RO- CCR7+ T cells, in the population of cells from step (iii) is increased by, for example, at least 1.2, 1.4, 1.6, 1.8, 2.0, 2.2, 2.4, 2.6, 2.8, or 3-fold, as compared to the percentage of naive cells, for example, naive T cells, for example, CD45RA+ CD45RO- CCR7+ cells, in the population of cells at the beginning of step (i);
(c) the percentage of CAR-expressing naive T cells, for example, CAR-expressing CD45RA+ CD45RO- CCR7+ T cells in the population of cells increases during the duration of step (ii), for example, increases by, for example, at least 30, 35, 40, 45, 50, 55, or 60%, between 18-24 hours after the beginning of step (ii); or
(d) the percentage of naive cells, for example, naive T cells, for example, CD45RA+ CD45RO- CCR7+ T cells, in the population of cells from step (iii) does not decrease, or decreases by no more than 5 or 10%, as compared to the percentage of naive cells, for example, naive T cells, for example, CD45RA+ CD45RO- CCR7+ cells, in the population of cells at the beginning of step (i).

19. The method of any one of claims 1-18, wherein:
(a) the population of cells from step (iii) shows a higher percentage of naive cells, for example, naive T cells, for example, CD45RA+ CD45RO- CCR7+ T cells (for example, at least 10, 20, 30, or 40% higher), compared with cells made by an otherwise similar method in which step (iii) is performed more than 26 hours after the beginning of step (i), for example, more than 5, 6, 7, 8, 9, 10, 11, or 12 days after the beginning of step (i);
(b) the percentage of naive cells, for example, naive T cells, for example, CD45RA+ CD45RO- CCR7+ T cells, in the population of cells from step (iii) is higher (for example, at least 1.2, 1.4, 1.6, 1.8, 2.0, 2.2, 2.4, 2.6, 2.8, or 3-fold higher) than the percentage of naive cells, for example, naive T cells, for example, CD45RA+ CD45RO- CCR7+ T cells, in cells made by an otherwise similar method in which step (iii) is performed more than 26 hours after the beginning of step (i), for example, more than 5, 6, 7, 8, 9, 10, 11, or 12 days after the beginning of step (i);
(c) the percentage of CAR-expressing naive T cells, for example, CAR-expressing CD45RA+ CD45RO- CCR7+ T cells, in the population of cells from step (iii) is higher (for example, at least 4, 6, 8, 10, or 12-fold higher) than the percentage of CAR-expressing naive T cells, for example, CAR-expressing CD45RA+ CD45RO- CCR7+ T cells, in cells made by an otherwise similar method in which step (iii) is performed more than 26 hours after the beginning of step (i), for example, more than 5, 6, 7, 8, 9, 10, 11, or 12 days after the beginning of step (i);
(d) the population of cells from step (iii) shows a higher percentage of naive cells, for example, naive T cells, for example, CD45RA+ CD45RO- CCR7+ T cells (for example, at least 10, 20, 30, or 40% higher), compared with cells made by an otherwise similar method which further comprises, after step (ii) and prior to step (iii), expanding the population of cells (for example, T cells) in vitro for more than 3 days, for example, for 5, 6, 7, 8 or 9 days;
(e) the percentage of naive cells, for example, naive T cells, for example, CD45RA+ CD45RO- CCR7+ T cells, in the population of cells from step (iii) is higher (for example, at least 1.2, 1.4, 1.6, 1.8, 2.0, 2.2, 2.4, 2.6, 2.8, or 3-fold higher) than the percentage of naive cells, for example, naive T cells, for example, CD45RA+ CD45RO- CCR7+ T cells, in cells made by an otherwise similar method which further comprises, after step (ii) and prior to step (iii), expanding the population of cells (for example, T cells) in vitro for more than 3 days, for example, for 5, 6, 7, 8 or 9 days; or
(f) the percentage of CAR-expressing naive T cells, for example, CAR-expressing CD45RA+ CD45RO- CCR7+ T cells, in the population of cells from step (iii) is higher (for example, at least 4, 6, 8, 10, or 12-fold higher) than the percentage of CAR-expressing naive T cells, for example, CAR-expressing CD45RA+ CD45RO- CCR7+ T cells, in cells made by an otherwise similar method which further comprises, after step (ii) and prior to step (iii), expanding the population of cells (for example, T cells) in vitro for more than 3 days, for example, for 5, 6, 7, 8 or 9 days.

20. The method of any one of claims 1-19, wherein:
(a) the percentage of central memory cells, for example, central memory T cells, for example, CD95+ central memory T cells, in the population of cells from step (iii) is the same as or differs by no more than 5 or 10% from the percentage of central memory cells, for example, central memory T cells, for example, CD95+ central memory T cells, in the population of cells at the beginning of step (i);
(b) the percentage of central memory cells, for example, central memory T cells, for example, CCR7+CD45RO+ T cells, in the population of cells from step (iii) is reduced by at least 20, 25, 30, 35, 40, 45, or 50%, as compared to the percentage of central memory cells, for example, central memory T cells, for example, CCR7+CD45RO+ T cells, in the population of cells at the beginning of step (i);
(c) the percentage of CAR-expressing central memory T cells, for example, CAR-expressing CCR7+CD45RO+ cells, decreases during the duration of step (ii), for example, decreases by, for example, at least 8, 10, 12, 14, 16, 18, or 20%, between 18-24 hours after the beginning of step (ii); or
(d) the percentage of central memory cells, for example, central memory T cells, for example, CCR7+CD45RO+ T cells, in the population of cells from step (iii) does not increase, or increases by no more than 5 or 10%, as compared to the percentage of central memory cells, for example, central memory T cells, for example, CCR7+CD45RO+ T cells, in the population of cells at the beginning of step (i).

21. The method of any one of claims 1-20, wherein:
(a) the population of cells from step (iii) shows a lower percentage of central memory cells, for example, central memory T cells, for example, CD95+ central memory T cells (for example, at least 10, 20, 30, or 40% lower), compared with cells made by an otherwise similar method in which step (iii) is performed more than 26 hours after the beginning of step (i), for example, more than 5, 6, 7, 8, 9, 10, 11, or 12 days after the beginning of step (i);
(b) the percentage of central memory cells, for example, central memory T cells, for example, CCR7+CD45RO+ T cells in the population of cells from step (iii) is lower (for example, at least 20, 30, 40, or 50% lower) than the percentage of central memory cells, for example, central memory T cells, for example, CCR7+CD45RO+ T cells, in cells made by an otherwise similar method in which step (iii) is performed more than 26 hours after the beginning of step (i), for example, more than 5, 6, 7, 8, 9, 10, 11, or 12 days after the beginning of step (i);
(c) the percentage of CAR-expressing central memory T cells, for example, CAR-expressing CCR7+CD45RO+ T cells in the population of cells from step (iii) is lower (for example, at least 10, 20, 30, or 40% lower) than the percentage of CAR-expressing central memory T cells, for example, CAR-expressing CCR7+CD45RO+ T cells, in cells made by an otherwise similar method in which step (iii) is performed more than 26 hours after the beginning of step (i), for example, more than 5, 6, 7, 8, 9, 10, 11, or 12 days after the beginning of step (i);
(d) the population of cells from step (iii) shows a lower percentage of central memory cells, for example, central memory T cells, for example, CD95+ central memory T cells (for example, at least 10, 20, 30, or 40% lower), compared with cells made by an otherwise similar method which further comprises, after step (ii) and prior to step (iii), expanding the population of cells (for example, T cells) in vitro for more than 3 days, for example, for 5, 6, 7, 8 or 9 days;
(e) the percentage of central memory cells, for example, central memory T cells, for example, CCR7+CD45RO+ T cells in the population of cells from step (iii) is lower (for example, at least 20, 30, 40, or 50% lower) than the percentage of central memory cells, for example, central memory T cells, for example, CCR7+CD45RO+ T cells, in cells made by an otherwise similar method which further comprises, after step (ii) and prior to step (iii), expanding the population of cells (for example, T cells) in vitro for more than 3 days, for example, for 5, 6, 7, 8 or 9 days; or
(f) the percentage of CAR-expressing central memory T cells, for example, CAR-expressing CCR7+CD45RO+ T cells in the population of cells from step (iii) is lower (for example, at least 10, 20, 30, or 40% lower) than the percentage of CAR-expressing central memory T cells, for example, CAR-expressing CCR7+CD45RO+ T cells, in cells made by an otherwise similar method which further comprises, after step (ii) and prior to step (iii), expanding the population of cells (for example, T cells) in vitro for more than 3 days, for example, for 5, 6, 7, 8 or 9 days.

22. The method of any one of claims 1-21, wherein:
(a) the percentage of stem memory T cells, for example, CD45RA+CD95+IL-2 receptor β+CCR7+CD62L+ T cells, in the population of cells from step (iii) is increased, as compared to the percentage of stem memory T cells, for example, CD45RA+CD95+IL-2 receptor β+CCR7+CD62L+ T cells, in the population of cells at the beginning of step (i);
(b) the percentage of CAR-expressing stem memory T cells, for example, CAR-expressing CD45RA+CD95+IL-2 receptor β+CCR7+CD62L+ T cells, in the population of cells from step (iii) is increased, as compared to the percentage of CAR-expressing stem memory T cells, for example, CAR-expressing CD45RA+CD95+IL-2 receptor β+CCR7+CD62L+ T cells, in the population of cells at the beginning of step (i);
(c) the percentage of stem memory T cells, for example, CD45RA+CD95+IL-2 receptor β+CCR7+CD62L+ T cells, in the population of cells from step (iii) is higher than the percentage of stem memory T cells, for example, CD45RA+CD95+IL-2 receptor β+CCR7+CD62L+ T cells, in cells made by an otherwise similar method in which step (iii) is performed more than 26 hours after the beginning of step (i), for example, more than 5, 6, 7, 8, 9, 10, 11, or 12 days after the beginning of step (i); or
(d) the percentage of CAR-expressing stem memory T cells, for example, CAR-expressing CD45RA+CD95+IL-2 receptor β+CCR7+CD62L+ T cells, in the population of cells from step (iii) is higher than the percentage of CAR-expressing stem memory T cells, for example, CAR-expressing CD45RA+CD95+IL-2 receptor β+CCR7+CD62L+ T cells, in cells made by an otherwise similar method in which step (iii) is performed more than 26 hours after the beginning of step (i), for example, more than 5, 6, 7, 8, 9, 10, 11, or 12 days after the beginning of step (i);
(e) the percentage of stem memory T cells, for example, CD45RA+CD95+IL-2 receptor β+CCR7+CD62L+ T cells, in the population of cells from step (iii) is higher than the percentage of stem memory T cells, for example, CD45RA+CD95+IL-2 receptor β+CCR7+CD62L+ T cells, in cells made by an otherwise similar method which further comprises, after step (ii) and prior to step (iii), expanding the population of cells (for example, T cells) in vitro for more than 3 days, for example, for 5, 6, 7, 8 or 9 days; or
(f) the percentage of CAR-expressing stem memory T cells, for example, CAR-expressing CD45RA+CD95+IL-2 receptor β+CCR7+CD62L+ T cells, in the population of cells from step (iii) is higher than the percentage of CAR-expressing stem memory T cells, for example, CAR-expressing CD45RA+CD95+IL-2 receptor β+CCR7+CD62L+ T cells, in cells made by an otherwise similar method which further comprises, after step (ii) and prior to step (iii), expanding the population of cells (for example, T cells) in vitro for more than 3 days, for example, for 5, 6, 7, 8 or 9 days.

23. The method of any one of claims 1-22, wherein:
(a) the median GeneSetScore (Up TEM vs. Down TSCM) of the population of cells from step (iii) is about the same as or differs by no more than (for example, increased by no more than) about 25, 50, 75, 100, or 125% from the median GeneSetScore (Up TEM vs. Down TSCM) of the population of cells at the beginning of step (i);
(b) the median GeneSetScore (Up TEM vs. Down TSCM) of the population of cells from step (iii) is lower (for example, at least about 100, 150, 200, 250, or 300% lower) than the median GeneSetScore (Up TEM vs. Down TSCM) of:
cells made by an otherwise similar method in which step (iii) is performed more than 26 hours after the beginning of step (i), for example, more than 5, 6, 7, 8, 9, 10, 11, or 12 days after the beginning of step (i), or
cells made by an otherwise similar method which further comprises, after step (ii) and prior to step (iii), expanding the population of cells (for example, T cells) in vitro for more than 3 days, for example, for 5, 6, 7, 8 or 9 days;
(c) the median GeneSetScore (Up Treg vs. Down Teff) of the population of cells from step (iii) is about the same as or differs by no more than (for example, increased by no more than) about 25, 50, 100, 150, or 200% from the median GeneSetScore (Up Treg vs. Down Teff) of the population of cells at the beginning of step (i);
(d) the median GeneSetScore (Up Treg vs. Down Teff) of the population of cells from step (iii) is lower (for example, at least about 50, 100, 125, 150, or 175% lower) than the median GeneSetScore (Up Treg vs. Down Teff) of:
cells made by an otherwise similar method in which step (iii) is performed more than 26 hours after the beginning of step (i), for example, more than 5, 6, 7, 8, 9, 10, 11, or 12 days after the beginning of step (i), or
cells made by an otherwise similar method which further comprises, after step (ii) and prior to step (iii), expanding the population of cells (for example, T cells) in vitro for more than 3 days, for example, for 5, 6, 7, 8 or 9 days;
(e) the median GeneSetScore (Down sternness) of the population of cells from step (iii) is about the same as or differs by no more than (for example, increased by no more than) about 25, 50, 100, 150, 200, or 250% from the median GeneSetScore (Down sternness) of the population of cells at the beginning of step (i);
(f) the median GeneSetScore (Down sternness) of the population of cells from step (iii) is lower (for example, at least about 50, 100, or 125% lower) than the median GeneSetScore (Down sternness) of:
cells made by an otherwise similar method in which step (iii) is performed more than 26 hours after the beginning of step (i), for example, more than 5, 6, 7, 8, 9, 10, 11, or 12 days after the beginning of step (i), or
cells made by an otherwise similar method which further comprises, after step (ii) and prior to step (iii), expanding the population of cells (for example, T cells) in vitro for more than 3 days, for example, for 5, 6, 7, 8 or 9 days;
(g) the median GeneSetScore (Up hypoxia) of the population of cells from step (iii) is about the same as or differs by no more than (for example, increased by no more than) about 125, 150, 175, or 200% from the median GeneSetScore (Up hypoxia) of the population of cells at the beginning of step (i);
(h) the median GeneSetScore (Up hypoxia) of the population of cells from step (iii) is lower (for example, at least about 40, 50, 60, 70, or 80% lower) than the median GeneSetScore (Up hypoxia) of:
cells made by an otherwise similar method in which step (iii) is performed more than 26 hours after the beginning of step (i), for example, more than 5, 6, 7, 8, 9, 10, 11, or 12 days after the beginning of step (i), or
cells made by an otherwise similar method which further comprises, after step (ii) and prior to step (iii), expanding the population of cells (for example, T cells) in vitro for more than 3 days, for example, for 5, 6, 7, 8 or 9 days;
(j) the median GeneSetScore (Up autophagy) of the population of cells from step (iii) is about the same as or differs by no more than (for example, increased by no more than) about 180, 190, 200, or 210% from the median GeneSetScore (Up autophagy) of the population of cells at the beginning of step (i); or
(k) the median GeneSetScore (Up autophagy) of the population of cells from step (iii) is lower (for example, at least 20, 30, or 40% lower) than the median GeneSetScore (Up autophagy) of:
cells made by an otherwise similar method in which step (iii) is performed more than 26 hours after the beginning of step (i), for example, more than 5, 6, 7, 8, 9, 10, 11, or 12 days after the beginning of step (i), or
cells made by an otherwise similar method which further comprises, after step (ii) and prior to step (iii), expanding the population of cells (for example, T cells) in vitro for more than 3 days, for example, for 5, 6, 7, 8 or 9 days.

24. The method of any one of claims 1-23, wherein the population of cells from step (iii), after being incubated with a cell expressing an antigen recognized by the CAR, secretes IL-2 at a higher level (for example, at least 2, 4, 6, 8, 10, 12, or 14-fold higher) than cells made by an otherwise similar method in which step (iii) is performed more than 26 hours after the beginning of step (i), for example, more than 5, 6, 7, 8, 9, 10, 11, or 12 days after the beginning of step (i), or cells made by an otherwise similar method which further comprises, after step (ii) and prior to step (iii), expanding the population of cells (for example, T cells) in vitro for more than 3 days, for example, for 5, 6, 7, 8 or 9 days, for example, as assessed using methods described in Example 8 with respect to FIGs. 29C-29D.

25. The method of any one of claims 1-24, wherein the population of cells from step (iii), after being administered in vivo, persists longer or expands at a higher level (for example, as assessed using methods described in Example 1 with respect to FIG. 4C), compared with cells made by an otherwise similar method in which step (iii) is performed more than 26 hours after the beginning of step (i), for example, more than 5, 6, 7, 8, 9, 10, 11, or 12 days after the beginning of step (i), or compared with cells made by an otherwise similar method which further comprises, after step (ii) and prior to step (iii), expanding the population of cells (for example, T cells) in vitro for more than 3 days, for example, for 5, 6, 7, 8 or 9 days.

26. The method of any one of claims 1-25, wherein the population of cells from step (iii), after being administered in vivo, shows a stronger anti-tumor activity (for example, a stronger anti-tumor activity at a low dose, for example, a dose no more than 0.15 × 10⁶, 0.2 × 10⁶, 0.25 × 10⁶, or 0.3 × 10⁶ viable CAR-expressing cells) than cells made by an otherwise similar method in which step (iii) is performed more than 26 hours after the beginning of step (i), for example, more than 5, 6, 7, 8, 9, 10, 11, or 12 days after the beginning of step (i), or cells made by an otherwise similar method which further comprises, after step (ii) and prior to step (iii), expanding the population of cells (for example, T cells) in vitro for more than 3 days, for example, for 5, 6, 7, 8 or 9 days.

27. The method of any one of claims 1-26, the population of cells from step (iii) are not expanded, or expanded by no more than 5, 10, 15, 20, 25, 30, 35, or 40%, for example, no more than 10%, for example, as assessed by the number of living cells, compared to the population of cells at the beginning of step (i), optionally wherein the number of living cells in the population of cells from step (iii) decreases from the number of living cells in the population of cells at the beginning of step (i).

28. The method of any one of claims 1-27, wherein the population of cells from step (iii) are not expanded, or expanded by less than 2 hours, for example, less than 1 or 1.5 hours, compared to the population of cells at the beginning of step (i).

29. The method of any one of claims 1-28, wherein steps (i) and/or (ii) are performed in cell media (for example, serum-free media) comprising IL-2, IL-15 (for example, hetIL-15 (IL15/sIL-15Ra)), IL-7, IL-21, IL-6 (for example, IL-6/sIL-6Ra), a LSD1 inhibitor, a MALT1 inhibitor, or a combination thereof.

30. The method of any one of claims 1-29, wherein steps (i) and/or (ii) are performed in serum-free cell media comprising a serum replacement.

31. The method of claim 30, wherein the serum replacement is CTS™ Immune Cell Serum Replacement (ICSR).

32. The method of any one of claims 1-31, further comprising prior to step (i):
(iv) (optionally) receiving a fresh leukapheresis product (or an alternative source of hematopoietic tissue such as a fresh whole blood product, a fresh bone marrow product, or a fresh tumor or organ biopsy or removal (for example, a fresh product from thymectomy)) from an entity, for example, a laboratory, hospital, or healthcare provider, and
(v) isolating the population of cells (for example, T cells, for example, CD8+ and/or CD4+ T cells) contacted in step (i) from a fresh leukapheresis product (or an alternative source of hematopoietic tissue such as a fresh whole blood product, a fresh bone marrow product, or a fresh tumor or organ biopsy or removal (for example, a fresh product from thymectomy)), optionally wherein:
step (iii) is performed no later than 35 hours after the beginning of step (v), for example, no later than 27, 28, 29, 30, 31, 32, 33, 34, or 35 hours after the beginning of step (v), for example, no later than 30 hours after the beginning of step (v), or
the population of cells from step (iii) are not expanded, or expanded by no more than 5, 10, 15, 20, 25, 30, 35, or 40%, for example, no more than 10%, for example, as assessed by the number of living cells, compared to the population of cells at the end of step (v).

33. The method of any one of claims 1-31, further comprising prior to step (i): receiving cryopreserved T cells isolated from a leukapheresis product (or an alternative source of hematopoietic tissue such as cryopreserved T cells isolated from whole blood, bone marrow, or tumor or organ biopsy or removal (for example, thymectomy)) from an entity, for example, a laboratory, hospital, or healthcare provider.

34. The method of any one of claims 1-31, further comprising prior to step (i):
(iv) (optionally) receiving a cryopreserved leukapheresis product (or an alternative source of hematopoietic tissue such as a cryopreserved whole blood product, a cryopreserved bone marrow product, or a cryopreserved tumor or organ biopsy or removal (for example, a cryopreserved product from thymectomy)) from an entity, for example, a laboratory, hospital, or healthcare provider, and
(v) isolating the population of cells (for example, T cells, for example, CD8+ and/or CD4+ T cells) contacted in step (i) from a cryopreserved leukapheresis product (or an alternative source of hematopoietic tissue such as a cryopreserved whole blood product, a cryopreserved bone marrow product, or a cryopreserved tumor or organ biopsy or removal (for example, a cryopreserved product from thymectomy)), optionally wherein:
step (iii) is performed no later than 35 hours after the beginning of step (v), for example, no later than 27, 28, 29, 30, 31, 32, 33, 34, or 35 hours after the beginning of step (v), for example, no later than 30 hours after the beginning of step (v), or
the population of cells from step (iii) are not expanded, or expanded by no more than 5, 10, 15, 20, 25, 30, 35, or 40%, for example, no more than 10%, for example, as assessed by the number of living cells, compared to the population of cells at the end of step (v).

35. The method of any one of claims 1-34, further comprising step (vi):
culturing a portion of the population of cells from step (iii) for at least 2, 2.5, 3, 3.5, 4, 4.5, 5, 5.5, 6, 6.5, or 7 days, for example, at least 2 days and no more than 7 days, and measuring CAR expression level in the portion (for example, measuring the percentage of viable, CAR-expressing cells in the portion), optionally wherein:
step (iii) comprises harvesting and freezing the population of cells (for example, T cells) and step (vi) comprises thawing a portion of the population of cells from step (iii), culturing the portion for at least 2, 2.5, 3, 3.5, 4, 4.5, 5, 5.5, 6, 6.5, or 7 days, for example, at least 2 days and no more than 7 days, and measuring CAR expression level in the portion (for example, measuring the percentage of viable, CAR-expressing cells in the portion).

36. The method of any one of claims 1-35, wherein step (ii) further comprises adding F108 during transduction and/or contacting the population of cells (for example, T cells) with an shRNA that targets Tet2.

37. The method of any one of claims 1-36, wherein the population of cells at the beginning of step (i) or step (1) has been enriched for IL6R-expressing cells (for example, cells that are positive for IL6Rα and/or IL6Rβ).

38. The method of any one of claims 1-37, wherein the population of cells at the beginning of step (i) or step (1) comprises no less than 50, 60, or 70% of IL6R-expressing cells (for example, cells that are positive for IL6Rα and/or IL6Rβ).

39. The method of any one of claims 1-38, wherein steps (i) and (ii) or steps (1) and (2) are performed in cell media comprising IL-15 (for example, hetIL-15 (IL15/sIL-15Ra)).

40. The method of claim 39, wherein IL-15 increases the ability of the population of cells to expand, for example, 10, 15, 20, or 25 days later.

41. The method of claim 39, wherein IL-15 increases the percentage of IL6Rβ-expressing cells in the population of cells.

42. The method of any one of claims 1-41, wherein the CAR comprises an antigen binding domain, a transmembrane domain, and an intracellular signaling domain.

43. The method of claim 42, wherein the antigen binding domain binds to an antigen chosen from: CD19, CD20, CD22, BCMA, mesothelin, EGFRvIII, GD2, Tn antigen, sTn antigen, Tn-O-Glycopeptides, sTn-O-Glycopeptides, PSMA, CD97, TAG72, CD44v6, CEA, EPCAM, KIT, IL-13Ra2, leguman, GD3, CD171, IL-11Ra, PSCA, MAD-CT-1, MAD-CT-2, VEGFR2, LewisY, CD24, PDGFR-beta, SSEA-4, folate receptor alpha, ERBBs (for example, ERBB2), Her2/neu, MUC1, EGFR, NCAM, Ephrin B2, CAIX, LMP2, sLe, HMWMAA, o-acetyl-GD2, folate receptor beta, TEM1/CD248, TEM7R, FAP, Legumain, HPV E6 or E7, ML-IAP, CLDN6, TSHR, GPRC5D, ALK, Polysialic acid, Fos-related antigen, neutrophil elastase, TRP-2, CYP1B 1, sperm protein 17, beta human chorionic gonadotropin, AFP, thyroglobulin, PLAC1, globoH, RAGE1, MN-CA IX, human telomerase reverse transcriptase, intestinal carboxyl esterase, mut hsp 70-2, NA-17, NY-BR-1, UPK2, HAVCR1, ADRB3, PANX3, NY-ESO-1, GPR20, Ly6k, OR51E2, TARP, GFRα4, or a peptide of any of these antigens presented on MHC.

44. The method of claim 42 or 43, wherein the antigen binding domain comprises a CDR, VH, VL, scFv or CAR sequence disclosed herein, optionally wherein:
(a) the antigen binding domain binds to BCMA and comprises a CDR, VH, VL, scFv or CAR sequence disclosed in Tables 3-15, or a sequence having at least 80%, 85%, 90%, 95%, or 99% identity thereto;
(b) the antigen binding domain binds to CD19 and comprises a CDR, VH, VL, scFv or CAR sequence disclosed in Table 2, or a sequence having at least 80%, 85%, 90%, 95%, or 99% identity thereto;
(c) the antigen binding domain binds to CD20 and comprises a CDR, VH, VL, scFv or CAR sequence disclosed herein, or a sequence having at least 80%, 85%, 90%, 95%, or 99% identity thereto; or
(d) the antigen binding domain binds to CD22 and comprises a CDR, VH, VL, scFv or CAR sequence disclosed herein, or a sequence having at least 80%, 85%, 90%, 95%, or 99% identity thereto.

45. The method of any one of claims 42-44, wherein the antigen binding domain comprises a VH and a VL, wherein the VH and VL are connected by a linker, optionally wherein the linker comprises the amino acid sequence of SEQ ID NO: 63 or 104.

46. The method of any one of claims 42-45, wherein:
(a) the transmembrane domain comprises a transmembrane domain of a protein chosen from the alpha, beta or zeta chain of T-cell receptor, CD28, CD3 epsilon, CD45, CD4, CD5, CD8, CD9, CD16, CD22, CD33, CD37, CD64, CD80, CD86, CD134, CD137 and CD154,
(b) the transmembrane domain comprises a transmembrane domain of CD8,
(c) the transmembrane domain comprises the amino acid sequence of SEQ ID NO: 6, or an amino acid sequence having at least about 85%, 90%, 95%, or 99% sequence identity thereof, or
(d) the nucleic acid molecule comprises a nucleic acid sequence encoding the transmembrane domain, wherein the nucleic acid sequence comprises the nucleic acid sequence of SEQ ID NO: 17, or a nucleic acid sequence having at least about 85%, 90%, 95%, or 99% sequence identity thereof.

47. The method of any one of claims 42-46, wherein the antigen binding domain is connected to the transmembrane domain by a hinge region, optionally wherein:
(a) the hinge region comprises the amino acid sequence of SEQ ID NO: 2, 3, or 4, or an amino acid sequence having at least about 85%, 90%, 95%, or 99% sequence identity thereof, or
(b) the nucleic acid molecule comprises a nucleic acid sequence encoding the hinge region, wherein the nucleic acid sequence comprises the nucleic acid sequence of SEQ ID NO: 13, 14, or 15, or a nucleic acid sequence having at least about 85%, 90%, 95%, or 99% sequence identity thereof.

48. The method of any one of claims 42-47, wherein the intracellular signaling domain comprises a primary signaling domain, optionally wherein the primary signaling domain comprises a functional signaling domain derived from CD3 zeta, TCR zeta, FcR gamma, FcR beta, CD3 gamma, CD3 delta, CD3 epsilon, CD5, CD22, CD79a, CD79b, CD278 (ICOS), FcεRI, DAP10, DAP12, or CD66d, optionally wherein:
(a) the primary signaling domain comprises a functional signaling domain derived from CD3 zeta,
(b) the primary signaling domain comprises the amino acid sequence of SEQ ID NO: 9 or 10, or an amino acid sequence having at least about 85%, 90%, 95%, or 99% sequence identity thereof, or
(c) the nucleic acid molecule comprises a nucleic acid sequence encoding the primary signaling domain, wherein the nucleic acid sequence comprises the nucleic acid sequence of SEQ ID NO: 20 or 21, or a nucleic acid sequence having at least about 85%, 90%, 95%, or 99% sequence identity thereof.

49. The method of any one of claims 42-48, wherein the intracellular signaling domain comprises a costimulatory signaling domain, optionally wherein the costimulatory signaling domain comprises a functional signaling domain derived from a MHC class I molecule, a TNF receptor protein, an Immunoglobulin-like protein, a cytokine receptor, an integrin, a signaling lymphocytic activation molecule (SLAM protein), an activating NK cell receptor, BTLA, a Toll ligand receptor, OX40, CD2, CD7, CD27, CD28, CD30, CD40, CDS, ICAM-1, 4-1BB (CD137), B7-H3, ICOS (CD278), GITR, BAFFR, LIGHT, HVEM (LIGHTR), KIRDS2, SLAMF7, NKp80 (KLRF1), NKp44, NKp30, NKp46, CD19, CD4, CD8alpha, CD8beta, IL2R beta, IL2R gamma, IL7R alpha, ITGA4, VLA1, CD49a, ITGA4, IA4, CD49D, ITGA6, VLA-6, CD49f, ITGAD, CD11d, ITGAE, CD103, ITGAL, CD11a, LFA-1, ITGAM, CD11b, ITGAX, CD11c, ITGB1, CD29, ITGB2, CD18, ITGB7, NKG2D, NKG2C, TNFR2, TRANCE/RANKL, DNAM1 (CD226), SLAMF4 (CD244, 2B4), CD84, CD96 (Tactile), CEACAM1, CRTAM, Ly9 (CD229), CD160 (BY55), PSGL1, CD100 (SEMA4D), CD69, SLAMF6 (NTB-A, Ly108), SLAM (SLAMF1, CD150, IPO-3), BLAME (SLAMF8), SELPLG (CD162), LTBR, LAT, GADS, SLP-76, PAG/Cbp, CD19a, CD28-OX40, CD28-4-1BB, or a ligand that specifically binds with CD83, optionally wherein:
(a) the costimulatory signaling domain comprises a functional signaling domain derived from 4-1BB,
(b) the costimulatory signaling domain comprises the amino acid sequence of SEQ ID NO: 7, or an amino acid sequence having at least about 85%, 90%, 95%, or 99% sequence identity thereof, or
(c) the nucleic acid molecule comprises a nucleic acid sequence encoding the costimulatory signaling domain, wherein the nucleic acid sequence comprises the nucleic acid sequence of SEQ ID NO: 18, or a nucleic acid sequence having at least about 85%, 90%, 95%, or 99% sequence identity thereof.

50. The method of any one of claims 42-49, wherein the intracellular signaling domain comprises a functional signaling domain derived from 4-1BB and a functional signaling domain derived from CD3 zeta, optionally wherein the intracellular signaling domain comprises the amino acid sequence of SEQ ID NO: 7 (or an amino acid sequence having at least about 85%, 90%, 95%, or 99% sequence identity thereof) and the amino acid sequence of SEQ ID NO: 9 or 10 (or an amino acid sequence having at least about 85%, 90%, 95%, or 99% sequence identity thereof), optionally wherein the intracellular signaling domain comprises the amino acid sequence of SEQ ID NO: 7 and the amino acid sequence of SEQ ID NO: 9 or 10.

51. The method of any one of claims 42-50, wherein the CAR further comprises a leader sequence comprising the amino acid sequence of SEQ ID NO: 1.

52. A population of CAR-expressing cells (for example, autologous or allogeneic CAR-expressing T cells or NK cells) made by the method of any one of claims 1-51.

53. A pharmaceutical composition comprising the population of CAR-expressing cells of claim 52 and a pharmaceutically acceptable carrier.

54. A method of increasing an immune response in a subject, comprising administering the population of CAR-expressing cells of claim 52 or the pharmaceutical composition of claim 53 to the subject, thereby increasing an immune response in the subject.

55. A method of treating a cancer in a subject, comprising administering the population of CAR-expressing cells of claim 52 or the pharmaceutical composition of claim 53 to the subject, thereby treating the cancer in the subject.

56. The method of claim 55, wherein the cancer is a solid cancer, for example, chosen from: one or more of mesothelioma, malignant pleural mesothelioma, non-small cell lung cancer, small cell lung cancer, squamous cell lung cancer, large cell lung cancer, pancreatic cancer, pancreatic ductal adenocarcinoma, esophageal adenocarcinoma, breast cancer, glioblastoma, ovarian cancer, colorectal cancer, prostate cancer, cervical cancer, skin cancer, melanoma, renal cancer, liver cancer, brain cancer, thymoma, sarcoma, carcinoma, uterine cancer, kidney cancer, gastrointestinal cancer, urothelial cancer, pharynx cancer, head and neck cancer, rectal cancer, esophagus cancer, or bladder cancer, or a metastasis thereof.

57. The method of claim 55, wherein the cancer is a liquid cancer, for example, chosen from: chronic lymphocytic leukemia (CLL), mantle cell lymphoma (MCL), multiple myeloma, acute lymphoid leukemia (ALL), Hodgkin lymphoma, B-cell acute lymphoid leukemia (BALL), T-cell acute lymphoid leukemia (TALL), small lymphocytic leukemia (SLL), B cell prolymphocytic leukemia, blastic plasmacytoid dendritic cell neoplasm, Burkitt’s lymphoma, diffuse large B cell lymphoma (DLBCL), DLBCL associated with chronic inflammation, chronic myeloid leukemia, myeloproliferative neoplasms, follicular lymphoma, pediatric follicular lymphoma, hairy cell leukemia, small cell- or a large cell-follicular lymphoma, malignant lymphoproliferative conditions, MALT lymphoma (extranodal marginal zone lymphoma of mucosa-associated lymphoid tissue), Marginal zone lymphoma, myelodysplasia, myelodysplastic syndrome, non-Hodgkin lymphoma, plasmablastic lymphoma, plasmacytoid dendritic cell neoplasm, Waldenstrom macroglobulinemia, splenic marginal zone lymphoma, splenic lymphoma/leukemia, splenic diffuse red pulp small B-cell lymphoma, hairy cell leukemia-variant, lymphoplasmacytic lymphoma, a heavy chain disease, plasma cell myeloma, solitary plasmocytoma of bone, extraosseous plasmocytoma, nodal marginal zone lymphoma, pediatric nodal marginal zone lymphoma, primary cutaneous follicle center lymphoma, lymphomatoid granulomatosis, primary mediastinal (thymic) large B-cell lymphoma, intravascular large B-cell lymphoma, ALK+ large B-cell lymphoma, large B-cell lymphoma arising in HHV8-associated multicentric Castleman disease, primary effusion lymphoma, B-cell lymphoma, acute myeloid leukemia (AML), or unclassifiable lymphoma.

58. The method of any one of claims 54-57, further comprising administering a second therapeutic agent to the subject.

59. The method of any one of claims 54-58, wherein the population of CAR-expressing cells is administered at a dose determined based on the percentage of CAR-expressing cells measured in claim 35.

60. The population of CAR-expressing cells of claim 52 or the pharmaceutical composition of claim 53 for use in a method of increasing an immune response in a subject, said method comprising administering to the subject an effective amount of the population of CAR-expressing cells or an effective amount of the pharmaceutical composition.

61. The population of CAR-expressing cells of claim 52 or the pharmaceutical composition of claim 53 for use in a method of treating a cancer in a subject, said method comprising administering to the subject an effective amount of the population of CAR-expressing cells or an effective amount of the pharmaceutical composition.

62. An antibody molecule that binds CD28, comprising a heavy chain variable region (VH) comprising a heavy chain complementarity determining region 1 (HCDR1), a HCDR2, and a HCDR3, and a light chain variable region (VL) comprising a light chain complementarity determining region 1 (LCDR1), a LCDR2, and a LCDR3, wherein:
(i) the HCDR1, HCDR2, HCDR3, LCDR1, LCDR2, and LCDR3 comprise the amino acid sequences of SEQ ID NOs: 538, 539, 540, 530, 531, and 532, respectively;
(ii) the HCDR1, HCDR2, HCDR3, LCDR1, LCDR2, and LCDR3 comprise the amino acid sequences of SEQ ID NOs: 541, 539, 540, 530, 531, and 532, respectively;
(iii) the HCDR1, HCDR2, HCDR3, LCDR1, LCDR2, and LCDR3 comprise the amino acid sequences of SEQ ID NOs: 542, 543, 540, 533, 534, and 535, respectively; or
(iv) the HCDR1, HCDR2, HCDR3, LCDR1, LCDR2, and LCDR3 comprise the amino acid sequences of SEQ ID NOs: 544, 545, 546, 536, 534, and 532, respectively.

63. The antibody molecule of claim 62, comprising:
(i) a VH comprising the amino acid sequence of SEQ ID NO: 547 or 548, or a sequence with at least 95% sequence identity to SEQ ID NO: 547 or 548;
(ii) a VL comprising the amino acid sequence of SEQ ID NO: 537, or a sequence with at least 95% sequence identity thereto;
(iii) a VH comprising the amino acid sequence of SEQ ID NO: 547 or a sequence with at least 95% sequence identity thereto, and a VL comprising the amino acid sequence of SEQ ID NO: 537, or a sequence with at least 95% sequence identity thereto; or
(iv) a VH comprising the amino acid sequence of SEQ ID NO: 548 or a sequence with at least 95% sequence identity thereto, and a VL comprising the amino acid sequence of SEQ ID NO: 537, or a sequence with at least 95% sequence identity thereto.

64. The antibody molecule of claim 62 or 63, which is a full length antibody, a bispecific antibody, Fab, F(ab′)2, Fv, or a single chain Fv fragment (scFv).

65. The antibody molecule of any one of claims 62-64, comprising a heavy chain constant region selected from IgG1, IgG2, IgG3, and IgG4, and a light chain constant region chosen from the light chain constant regions of kappa or lambda.

66. An antibody molecule that:
(i) competes for binding to CD28 with the antibody molecule of any one of claims 62-65; and/or
(ii) binds to the same epitope as, substantially the same epitope as, an epitope that overlaps with, or an epitope that substantially overlaps with, the epitope of the antibody molecule of any one of claims 62-65.

67. An isolated nucleic acid molecule encoding the antibody molecule of any one of claims 62-66.

68. A multispecific binding molecule comprising:
(i) an anti-CD3 binding domain, and
(ii) an anti-CD28 binding domain comprising the antibody molecule of any one of claims 62-66.

69. The multispecific binding molecule of claim 68, wherein the anti-CD3 binding domain comprises:
(i) a HCDR1, HCDR2, HCDR3, LCDR1, LCDR2, and LCDR3 of an anti-CD3 antibody molecule of Table 27 (for example the anti-CD3 (1), anti-CD3 (2), anti-CD3 (3), or anti-CD3 (4)); or
(ii) the amino acid sequence of any VH and/or VL region of an anti-CD3 antibody molecule provided in Table 27 (for example the anti-CD3 (1), anti-CD3 (2), anti-CD3 (3), or anti-CD3 (4)), or an amino acid sequence at least 95% identical thereto.

70. A multispecific binding molecule, comprising a first binding domain and a second binding domain, wherein the multispecific binding molecule comprises:
(i) a first polypeptide comprising from N-terminal to C-terminal: VH of the first binding domain, VL of the first binding domain, VH of the second binding domain, CH1, CH2, and CH3; and
(ii) a second polypeptide comprising from N-terminal to C-terminal: VL of the second binding domain and CL.

71. A multispecific binding molecule, comprising a first binding domain and a second binding domain, wherein the multispecific binding molecule comprises:
(i) a first polypeptide comprising from N-terminal to C-terminal: VH of the second binding domain, CH1, CH2, CH3, VH of the first binding domain, and VL of the first binding domain; and
(ii) a second polypeptide comprising from N-terminal to C-terminal: VL of the second binding domain and CL.

72. A multispecific binding molecule, comprising a first binding domain and a second binding domain, wherein the multispecific binding molecule comprises:
(i) a first polypeptide comprising from N-terminal to C-terminal: VH of the second binding domain, CH1, VH of the first binding domain, VL of the first binding domain, CH2, and CH3; and
(ii) a second polypeptide comprising from N-terminal to C-terminal: VL of the second binding domain and CL.

73. The multispecific binding molecule of any one of claims 70-72, wherein the first binding domain comprises an anti-CD3 binding domain and the second binding domain comprises a costimulatory molecule binding domain.

74. The multispecific binding molecule of any one of claims 70-72, wherein the first binding domain comprises a costimulatory molecule binding domain and the second binding domain comprises an anti-CD3 binding domain.

75. The multispecific binding molecule of claim 73 or 74, wherein the costimulatory molecule binding domain comprises an anti-CD2 binding domain or an anti-CD28 binding domain.

76. A method of activating cells (e.g., immune effector cells, e.g., T cells), comprising contacting (for example, binding) a population of cells (for example, T cells, for example, T cells isolated from a frozen or fresh leukapheresis product) with the multispecific binding molecule of any one of claims 68-75 or the antibody molecule of any one of claims 62-66.

77. A method of transducing cells (e.g., immune effector cells, e.g., T cells), comprising contacting (for example, binding) a population of cells (for example, T cells, for example, T cells isolated from a frozen or fresh leukapheresis product) with (i) the multispecific binding molecule of any one of claims 68-75 or the antibody molecule of any one of claims 62-66 and (ii) a nucleic acid molecule, e.g., a nucleic acid molecule encoding a CAR.

The application's sequence listing, which the Patent Office published only in electronic form, follows.

SEQUENCE LISTING (793 sequences)

SEQ ID NO: 1 - protein, 21 aa, Artificial Sequence
  source: /note="Description of Artificial Sequence: Synthetic peptide"
MALPVTALLLPLALLLHAARP

SEQ ID NO: 2 - protein, 45 aa, Artificial Sequence
  source: /note="Description of Artificial Sequence: Synthetic polypeptide"
TTTPAPRPPTPAPTIASQPLSLRPEACRPAAGGAVHTRGLDFACD

SEQ ID NO: 3 - protein, 230 aa, Artificial Sequence
  source: /note="Description of Artificial Sequence: Synthetic polypeptide"
ESKYGPPCPPCPAPEFLGGPSVFLFPPKPKDTLMISRTPEVTCVVVDVSQEDPEVQFNWYVDGVEVHNAKTKPREEQFNSTYRVVSVLTVLHQDWLNGKEYKCKVSNKGLPSSIEKTISKAKGQPREPQVYTLPPSQEEMTKNQVSLTCLVKGFYPSDIAVEWESNGQPENNYKTTPPVLDSDGSFFLYSRLTVDKSRWQEGNVFSCSVMHEALHNHYTQKSLSLSLGKM

SEQ ID NO: 4 - protein, 282 aa, Artificial Sequence
  source: /note="Description of Artificial Sequence: Synthetic polypeptide"
RWPESPKAQASSVPTAQPQAEGSLAKATTAPATTRNTGRGGEEKKKEKEKEEQEERETKTPECPSHTQPLGVYLLTPAVQDLWLRDKATFTCFVVGSDLKDAHLTWEVAGKVPTGGVEEGLLERHSNGSQSQHSRLTLPRSLWNAGTSVTCTLNHPSLPPQRLMALREPAAQAPVKLSLNLLASSDPPEAASWLLCEVSGFSPPNILLMWLEDQREVNTSGFAPARPPPQPGSTTFWAWSVLRVPAPPSPQPATYTCVVSHEDSRTLLNASRSLEVSYVTDH

SEQ ID NO: 5 - protein, 10 aa, Artificial Sequence
  source: /note="Description of Artificial Sequence: Synthetic peptide"
GGGGSGGGGS

SEQ ID NO: 6 - protein, 24 aa, Artificial Sequence
  source: /note="Description of Artificial Sequence: Synthetic peptide"
IYIWAPLAGTCGVLLLSLVITLYC

SEQ ID NO: 7 - protein, 42 aa, Artificial Sequence
  source: /note="Description of Artificial Sequence: Synthetic polypeptide"
KRGRKKLLYIFKQPFMRPVQTTQEEDGCSCRFPEEEEGGCEL

SEQ ID NO: 8 - protein, 48 aa, Artificial Sequence
  source: /note="Description of Artificial Sequence: Synthetic polypeptide"
QRRKYRSNKGESPVEPAEPCRYSCPREEEGSTIPIQEDYRKPEPACSP

SEQ ID NO: 9 - protein, 112 aa, Artificial Sequence
  source: /note="Description of Artificial Sequence: Synthetic polypeptide"
RVKFSRSADAPAYKQGQNQLYNELNLGRREEYDVLDKRRGRDPEMGGKPRRKNPQEGLYNELQKDKMAEAYSEIGMKGERRRGKGHDGLYQGLSTATKDTYDALHMQALPPR

SEQ ID NO: 10 - protein, 112 aa, Homo sapiens
RVKFSRSADAPAYQQGQNQLYNELNLGRREEYDVLDKRRGRDPEMGGKPRRKNPQEGLYNELQKDKMAEAYSEIGMKGERRRGKGHDGLYQGLSTATKDTYDALHMQALPPR

SEQ ID NO: 11 - DNA, 1184 bp, Artificial Sequence
  source: /note="Description of Artificial Sequence: Synthetic polynucleotide"
cgtgaggctccggtgcccgtcagtgggcagagcgcacatcgcccacagtccccgagaagttggggggaggggtcggcaattgaaccggtgcctagagaaggtggcgcggggtaaactgggaaagtgatgtcgtgtactggctccgcctttttcccgagggtgggggagaaccgtatataagtgcagtagtcgccgtgaacgttctttttcgcaacgggtttgccgccagaacacaggtaagtgccgtgtgtggttcccgcgggcctggcctctttacgggttatggcccttgcgtgccttgaattacttccacctggctgcagtacgtgattcttgatcccgagcttcgggttggaagtgggtgggagagttcgaggccttgcgcttaaggagccccttcgcctcgtgcttgagttgaggcctggcctgggcgctggggccgccgcgtgcgaatctggtggcaccttcgcgcctgtctcgctgctttcgataagtctctagccatttaaaatttttgatgacctgctgcgacgctttttttctggcaagatagtcttgtaaatgcgggccaagatctgcacactggtatttcggtttttggggccgcgggcggcgacggggcccgtgcgtcccagcgcacatgttcggcgaggcggggcctgcgagcgcggccaccgagaatcggacgggggtagtctcaagctggccggcctgctctggtgcctggcctcgcgccgccgtgtatcgccccgccctgggcggcaaggctggcccggtcggcaccagttgcgtgagcggaaagatggccgcttcccggccctgctgcagggagctcaaaatggaggacgcggcgctcgggagagcgggcgggtgagtcacccacacaaaggaaaagggcctttccgtcctcagccgtcgcttcatgtgactccacggagtaccgggcgccgtccaggcacctcgattagttctcgagcttttggagtacgtcgtctttaggttggggggaggggttttatgcgatggagtttccccacactgagtgggtggagactgaagttaggccagcttggcacttgatgtaattctccttggaatttgccctttttgagtttggatcttggttcattctcaagcctcagacagtggttcaaagtttttttcttccatttcaggtgtcgtga

SEQ ID NO: 12 - DNA, 63 bp, Artificial Sequence
  source: /note="Description of Artificial Sequence: Synthetic oligonucleotide"
atggccctgcctgtgacagccctgctgctgcctctggctctgctgctgcatgccgctagaccc

SEQ ID NO: 13 - DNA, 135 bp, Artificial Sequence
  source: /note="Description of Artificial Sequence: Synthetic polynucleotide"
accacgacgccagcgccgcgaccaccaacaccggcgcccaccatcgcgtcgcagcccctgtccctgcgcccagaggcgtgccggccagcggcggggggcgcagtgcacacgagggggctggacttcgcctgtgat

SEQ ID NO: 14 - DNA, 690 bp, Artificial Sequence
  source: /note="Description of Artificial Sequence: Synthetic polynucleotide"
gagagcaagtacggccctccctgccccccttgccctgcccccgagttcctgggcggacccagcgtgttcctgttcccccccaagcccaaggacaccctgatgatcagccggacccccgaggtgacctgtgtggtggtggacgtgtcccaggaggaccccgaggtccagttcaactggtacgtggacggcgtggaggtgcacaacgccaagaccaagccccgggaggagcagttcaatagcacctaccgggtggtgtccgtgctgaccgtgctgcaccaggactggctgaacggcaaggaatacaagtgtaaggtgtccaacaagggcctgcccagcagcatcgagaaaaccatcagcaaggccaagggccagcctcgggagccccaggtgtacaccctgccccctagccaagaggagatgaccaagaaccaggtgtccctgacctgcctggtgaagggcttctaccccagcgacatcgccgtggagtgggagagcaacggccagcccgagaacaactacaagaccaccccccctgtgctggacagcgacggcagcttcttcctgtacagccggctgaccgtggacaagagccggtggcaggagggcaacgtctttagctgctccgtgatgcacgaggccctgcacaaccactacacccagaagagcctgagcctgtccctgggcaagatg

SEQ ID NO: 15 - DNA, 847 bp, Artificial Sequence
  source: /note="Description of Artificial Sequence: Synthetic polynucleotide"
aggtggcccgaaagtcccaaggcccaggcatctagtgttcctactgcacagccccaggcagaaggcagcctagccaaagctactactgcacctgccactacgcgcaatactggccgtggcggggaggagaagaaaaaggagaaagagaaagaagaacaggaagagagggagaccaagacccctgaatgtccatcccatacccagccgctgggcgtctatctcttgactcccgcagtacaggacttgtggcttagagataaggccacctttacatgtttcgtcgtgggctctgacctgaaggatgcccatttgacttgggaggttgccggaaaggtacccacagggggggttgaggaagggttgctggagcgccattccaatggctctcagagccagcactcaagactcacccttccgagatccctgtggaacgccgggacctctgtcacatgtactctaaatcatcctagcctgcccccacagcgtctgatggcccttagagagccagccgcccaggcaccagttaagcttagcctgaatctgctcgccagtagtgatcccccagaggccgccagctggctcttatgcgaagtgtccggctttagcccgcccaacatcttgctcatgtggctggaggaccagcgagaagtgaacaccagcggcttcgctccagcccggcccccaccccagccgggttctaccacattctgggcctggagtgtcttaagggtcccagcaccacctagcccccagccagccacatacacctgtgttgtgtcccatgaagatagcaggaccctgctaaatgcttctaggagtctggaggtttcctacgtgactgaccatt

SEQ ID NO: 16 - DNA, 30 bp, Artificial Sequence
  source: /note="Description of Artificial Sequence: Synthetic oligonucleotide"
ggtggcggaggttctggaggtggaggttcc

SEQ ID NO: 17 - DNA, 72 bp, Artificial Sequence
  source: /note="Description of Artificial Sequence: Synthetic oligonucleotide"
atctacatctgggcgcccttggccgggacttgtggggtccttctcctgtcactggttatcaccctttactgc

SEQ ID NO: 18 - DNA, 126 bp, Artificial Sequence
  source: /note="Description of Artificial Sequence: Synthetic polynucleotide"
aaacggggcagaaagaaactcctgtatatattcaaacaaccatttatgagaccagtacaaactactcaagaggaagatggctgtagctgccgatttccagaagaagaagaaggaggatgtgaactg

SEQ ID NO: 19 - DNA, 123 bp, Artificial Sequence
  source: /note="Description of Artificial Sequence: Synthetic polynucleotide"
aggagtaagaggagcaggctcctgcacagtgactacatgaacatgactccccgccgccccgggcccacccgcaagcattaccagccctatgccccaccacgcgacttcgcagcctatcgctcc

SEQ ID NO: 20 - DNA, 336 bp, Artificial Sequence
  source: /note="Description of Artificial Sequence: Synthetic polynucleotide"
agagtgaagttcagcaggagcgcagacgcccccgcgtacaagcagggccagaaccagctctataacgagctcaatctaggacgaagagaggagtacgatgttttggacaagagacgtggccgggaccctgagatggggggaaagccgagaaggaagaaccctcaggaaggcctgtacaatgaactgcagaaagataagatggcggaggcctacagtgagattgggatgaaaggcgagcgccggaggggcaaggggcacgatggcctttaccagggtctcagtacagccaccaaggacacctacgacgcccttcacatgcaggccctgccccctcgc

SEQ ID NO: 21 - DNA, 336 bp, Homo sapiens
agagtgaagttcagcaggagcgcagacgcccccgcgtaccagcagggccagaaccagctctataacgagctcaatctaggacgaagagaggagtacgatgttttggacaagagacgtggccgggaccctgagatggggggaaagccgagaaggaagaaccctcaggaaggcctgtacaatgaactgcagaaagataagatggcggaggcctacagtgagattgggatgaaaggcgagcgccggaggggcaaggggcacgatggcctttaccagggtctcagtacagccaccaaggacacctacgacgcccttcacatgcaggccctgccccctcgc

SEQ ID NO: 22 - protein, 373 aa, Artificial Sequence
  source: /note="Description of Artificial Sequence: Synthetic polypeptide"
PGWFLDSPDRPWNPPTFSPALLVVTEGDNATFTCSFSNTSESFVLNWYRMSPSNQTDKLAAFPEDRSQPGQDCRFRVTQLPNGRDFHMSVVRARRNDSGTYLCGAISLAPKAQIKESLRAELRVTERRAEVPTAHPSPSPRPAGQFQTLVTTTPAPRPPTPAPTIASQPLSLRPEACRPAAGGAVHTRGLDFACDIYIWAPLAGTCGVLLLSLVITLYCKRGRKKLLYIFKQPFMRPVQTTQEEDGCSCRFPEEEEGGCELRVKFSRSADAPAYKQGQNQLYNELNLGRREEYDVLDKRRGRDPEMGGKPRRKNPQEGLYNELQKDKMAEAYSEIGMKGERRRGKGHDGLYQGLSTATKDTYDALHMQALPPR

SEQ ID NO: 23 - DNA, 1182 bp, Artificial Sequence
  source: /note="Description of Artificial Sequence: Synthetic polynucleotide"
atggccctccctgtcactgccctgcttctccccctcgcactcctgctccacgccgctagaccacccggatggtttctggactctccggatcgcccgtggaatcccccaaccttctcaccggcactcttggttgtgactgagggcgataatgcgaccttcacgtgctcgttctccaacacctccgaatcattcgtgctgaactggtaccgcatgagcccgtcaaaccagaccgacaagctcgccgcgtttccggaagatcggtcgcaaccgggacaggattgtcggttccgcgtgactcaactgccgaatggcagagacttccacatgagcgtggtccgcgctaggcgaaacgactccgggacctacctgtgcggagccatctcgctggcgcctaaggcccaaatcaaagagagcttgagggccgaactgagagtgaccgagcgcagagctgaggtgccaactgcacatccatccccatcgcctcggcctgcggggcagtttcagaccctggtcacgaccactccggcgccgcgcccaccgactccggccccaactatcgcgagccagcccctgtcgctgaggccggaagcatgccgccctgccgccggaggtgctgtgcatacccggggattggacttcgcatgcgacatctacatttgggctcctctcgccggaacttgtggcgtgctccttctgtccctggtcatcaccctgtactgcaagcggggtcggaaaaagcttctgtacattttcaagcagcccttcatgaggcccgtgcaaaccacccaggaggaggacggttgctcctgccggttccccgaagaggaagaaggaggttgcgagctgcgcgtgaagttctcccggagcgccgacgcccccgcctataagcagggccagaaccagctgtacaacgaactgaacctgggacggcgggaagagtacgatgtgctggacaagcggcgcggccgggaccccgaaatgggcgggaagcctagaagaaagaaccctcaggaaggcctgtataacgagctgcagaaggacaagatggccgaggcctactccgaaattgggatgaagggagagcggcggaggggaaaggggcacgacggcctgtaccaaggactgtccaccgccaccaaggacacatacgatgccctgcacatgcaggcccttccccctcgc

SEQ ID NO: 24 - protein, 394 aa, Artificial Sequence
  source: /note="Description of Artificial Sequence: Synthetic polypeptide"
MALPVTALLLPLALLLHAARPPGWFLDSPDRPWNPPTFSPALLVVTEGDNATFTCSFSNTSESFVLNWYRMSPSNQTDKLAAFPEDRSQPGQDCRFRVTQLPNGRDFHMSVVRARRNDSGTYLCGAISLAPKAQIKESLRAELRVTERRAEVPTAHPSPSPRPAGQFQTLVTTTPAPRPPTPAPTIASQPLSLRPEACRPAAGGAVHTRGLDFACDIYIWAPLAGTCGVLLLSLVITLYCKRGRKKLLYIFKQPFMRPVQTTQEEDGCSCRFPEEEEGGCELRVKFSRSADAPAYKQGQNQLYNELNLGRREEYDVLDKRRGRDPEMGGKPRRKNPQEGLYNELQKDKMAEAYSEIGMKGERRRGKGHDGLYQGLSTATKDTYDALHMQALPPR

SEQ ID NO: 25 - protein, 5 aa, Artificial Sequence
  source: /note="Description of Artificial Sequence: Synthetic peptide"
  source: /note="See specification as filed for detailed description of substitutions and preferred embodiments"
GGGGS

SEQ ID NO: 26 - protein, 30 aa, Artificial Sequence
  source: /note="Description of Artificial Sequence: Synthetic polypeptide"
  SITE (1)..(30): /note="This sequence may encompass 1-6 'Gly Gly Gly Gly Ser' repeating units"
  source: /note="See specification as filed for detailed description of substitutions and preferred embodiments"
GGGGSGGGGSGGGGSGGGGSGGGGSGGGGS

SEQ ID NO: 27 - protein, 20 aa, Artificial Sequence
  source: /note="Description of Artificial Sequence: Synthetic peptide"
GGGGSGGGGSGGGGSGGGGS

SEQ ID NO: 28 - protein, 15 aa, Artificial Sequence
  source: /note="Description of Artificial Sequence: Synthetic peptide"
GGGGSGGGGSGGGGS

SEQ ID NO: 29 - protein, 4 aa, Artificial Sequence
  source: /note="Description of Artificial Sequence: Synthetic peptide"
GGGS

SEQ ID NO: 30 - RNA, 5000 nt, Artificial Sequence
  source: /note="Description of Artificial Sequence: Synthetic polynucleotide"
  misc_feature (1)..(5000): /note="This sequence may encompass 50-5000 nucleotides"
aaaaaaaaaaaaaaaaaaaaaaaaaaaaaaaaaaaaaaaaaaaaaaaaaaaaaaaaaaaaaaaaaaaaaaaaaaaaaaaaaaaaaaaaaaaaaaaaaaaaaaaaaaaaaaaaaaaaaaaaaaaaaaaaaaaaaaaaaaaaaaaaaaaaaaaaaaaaaaaaaaaaaaaaaaaaaaaaaaaaaaaaaaaaaaaaaaaaaaaaaaaaaaaaaaaaaaaaaaaaaaaaaaaaaaaaaaaaaaaaaaaaaaaaaaaaaaaaaaaaaaaaaaaaaaaaaaaaaaaaaaaaaaaaaaaaaaaaaaaaaaaaaaaaaaaaaaaaaaaaaaaaaaaaaaaaaaaaaaaaaaaaaaaaaaaaaaaaaaaaaaaaaaaaaaaaaaaaaaaaaaaaaaaaaaaaaaaaaaaaaaaaaaaaaaaaaaaaaaaaaaaaaaaaaaaaaaaaaaaaaaaaaaaaaaaaaaaaaaaaaaaaaaaaaaaaaaaaaaaaaaaaaaaaaaaaaaaaaaaaaaaaaaaaaaaaaaaaaaaaaaaaaaaaaaaaaaaaaaaaaaaaaaaaaaaaaaaaaaaaaaaaaaaaaaaaaaaaaaaaaaaaaaaaaaaaaaaaaaaaaaaaaaaaaaaaaaaaaaaaaaaaaaaaaaaaaaaaaaaaaaaaaaaaaaaaaaaaaaaaaaaaaaaaaaaaaaaaaaaaaaaaaaaaaaaaaaaaaaaaaaaaaaaaaaaaaaaaaaaaaaaaaaaaaaaaaaaaaaaaaaaaaaaaaaaaaaaaaaaaaaaaaaaaaaaaaaaaaaaaaaaaaaaaaaaaaaaaaaaaaaaaaaaaaaaaaaaaaaaaaaaaaaaaaaaaaaaaaaaaaaaaaaaaaaaaaaaaaaaaaaaaaaaaaaaaaaaaaaaaaaaaaaaaaaaaaaaaaaaaaaaaaaaaaaaaaaaaaaaaaaaaaaaaaaaaaaaaaaaaaaaaaaaaaaaaaaaaaaaaaaaaaaaaaaaaaaaaaaaaaaaaaaaaaaaaaaaaaaaaaaaaaaaaaaaaaaaaaaaaaaaaaaaaaaaaaaaaaaaaaaaaaaaaaaaaaaaaaaaaaaaaaaaaaaaaaaaaaaaaaaaaaaaaaaaaaaaaaaaaaaaaaaaaaaaaaaaaaaaaaaaaaaaaaaaaaaaaaaaaaaaaaaaaaaaaaaaaaaaaaaaaaaaaaaaaaaaaaaaaaaaaaaaaaaaaaaaaaaaaaaaaaaaaaaaaaaaaaaaaaaaaaaaaaaaaaaaaaaaaaaaaaaaaaaaaaaaaaaaaaaaaaaaaaaaaaaaaaaaaaaaaaaaaaaaaaaaaaaaaaaaaaaaaaaaaaaaaaaaaaaaaaaaaaaaaaaaaaaaaaaaaaaaaaaaaaaaaaaaaaaaaaaaaaaaaaaaaaaaaaaaaaaaaaaaaaaaaaaaaaaaaaaaaaaaaaaaaaaaaaaaaaaaaaaaaaaaaaaaaaaaaaaaaaaaaaaaaaaaaaaaaaaaaaaaaaaaaaaaaaaaaaaaaaaaaaaaaaaaaaaaaaaaaaaaaaaaaaaaaaaaaaaaaaaaaaaaaaaaaaaaaaaaaaaaaaaaaaaaaaaaaaaaaaaaaaaaaaaaaaaaaaaaaaaaaaaaaaaaaaaaaaaaaaaaaaaaaaaaaaaaaaaaaaaaaaaaaaaaaaaaaaaaaaaaaaaaaaaaaaaaaaaaaaaaaaaaaaaaaaaaaaaaaaaaaaaaaaaaaaaaaaaaaaaaaaaaaaaaaaaaaaaaaaaaaaaaaaaaaaaaaaaaaaaaaaaaaaaaaaaaaaaaaaaaaaaaaaaaaaaaaaaaaaaaaaaaaaaaaaaaaaaaaaaaaaaaaaaaaaaaaaaaaaaaaaaaaaaaaaaaaaaaaaaaaaaaaaaaaaaaaaaaaaaaaaaaaaaaaaaaaaaaaaaaaaaaaaaaaaaaaaaaaaaaaaaaaaaaaaaaaaaaaaaaaaaaaaaaaaaaaaaaaaaaaaaaaaaaaaaaaaaaaaaaaaaaaaaaaaaaaaaaaaaaaaaaaaaaaaaaaaaaaaaaaaaaaaaaaaaaaaaaaaaaaaaaaaaaaaaaaaaaaaaaaaaaaaaaaaaaaaaaaaaaaaaaaaaaaaaaaaaaaaaaaaaaaaaaaaaaaaaaaaaaaaaaaaaaaaaaaaaaaaaaaaaaaaaaaaaaaaaaaaaaaaaaaaaaaaaaaaaaaaaaaaaaaaaaaaaaaaaaaaaaaaaaaaaaaaaaaaaaaaaaaaaaaaaaaaaaaaaaaaaaaaaaaaaaaaaaaaaaaaaaaaaaaaaaaaaaaaaaaaaaaaaaaaaaaaaaaaaaaaaaaaaaaaaaaaaaaaaaaaaaaaaaaaaaaaaaaaaaaaaaaaaaaaaaaaaaaaaaaaaaaaaaaaaaaaaaaaaaaaaaaaaaaaaaaaaaaaaaaaaaaaaaaaaaaaaaaaaaaaaaaaaaaaaaaaaaaaaaaaaaaaaaaaaaaaaaaaaaaaaaaaaaaaaaaaaaaaaaaaaaaaaaaaaaaaaaaaaaaaaaaaaaaaaaaaaaaaaaaaaaaaaaaaaaaaaaaaaaaaaaaaaaaaaaaaaaaaaaaaaaaaaaaaaaaaaaaaaaaaaaaaaaaaaaaaaaaaaaaaaaaaaaaaaaaaaaaaaaaaaaaaaaaaaaaaaaaaaaaaaaaaaaaaaaaaaaaaaaaaaaaaaaaaaaaaaaaaaaaaaaaaaaaaaaaaaaaaaaaaaaaaaaaaaaaaaaaaaaaaaaaaaaaaaaaaaaaaaaaaaaaaaaaaaaaaaaaaaaaaaaaaaaaaaaaaaaaaaaaaaaaaaaaaaaaaaaaaaaaaaaaaaaaaaaaaaaaaaaaaaaaaaaaaaaaaaaaaaaaaaaaaaaaaaaaaaaaaaaaaaaaaaaaaaaaaaaaaaaaaaaaaaaaaaaaaaaaaaaaaaaaaaaaaaaaaaaaaaaaaaaaaaaaaaaaaaaaaaaaaaaaaaaaaaaaaaaaaaaaaaaaaaaaaaaaaaaaaaaaaaaaaaaaaaaaaaaaaaaaaaaaaaaaaaaaaaaaaaaaaaaaaaaaaaaaaaaaaaaaaaaaaaaaaaaaaaaaaaaaaaaaaaaaaaaaaaaaaaaaaaaaaaaaaaaaaaaaaaaaaaaaaaaaaaaaaaaaaaaaaaaaaaaaaaaaaaaaaaaaaaaaaaaaaaaaaaaaaaaaaaaaaaaaaaaaaaaaaaaaaaaaaaaaaaaaaaaaaaaaaaaaaaaaaaaaaaaaaaaaaaaaaaaaaaaaaaaaaaaaaaaaaaaaaaaaaaaaaaaaaaaaaaaaaaaaaaaaaaaaaaaaaaaaaaaaaaaaaaaaaaaaaaaaaaaaaaaaaaaaaaaaaaaaaaaaaaaaaaaaaaaaaaaaaaaaaaaaaaaaaaaaaaaaaaaaaaaaaaaaaaaaaaaaaaaaaaaaaaaaaaaaaaaaaaaaaaaaaaaaaaaaaaaaaaaaaaaaaaaaaaaaaaaaaaaaaaaaaaaaaaaaaaaaaaaaaaaaaaaaaaaaaaaaaaaaaaaaaaaaaaaaaaaaaaaaaaaaaaaaaaaaaaaaaaaaaaaaaaaaaaaaaaaaaaaaaaaaaaaaaaaaaaaaaaaaaaaaaaaaaaaaaaaaaaaaaaaaaaaaaaaaaaaaaaaaaaaaaaaaaaaaaaaaaaaaaaaaaaaaaaaaaaaaaaaaaaaaaaaaaaaaaaaaaaaaaaaaaaaaaaaaaaaaaaaaaaaaaaaaaaaaaaaaaaaaaaaaaaaaaaaaaaaaaaaaaaaaaaaaaaaaaaaaaaaaaaaaaaaaaaaaaaaaaaaaaaaaaaaaaaaaaaaaaaaaaaaaaaaaaaaaaaaaaaaaaaaaaaaaaaaaaaaaaaaaaaaaaaaaaaaaaaaaaaaaaaaaaaaaaaaaaaaaaaaaaaaaaaaaaaaaaaaaaaaaaaaaaaaaaaaaaaaaaaaaaaaaaaaaaaaaaaaaaaaaaaaaaaaaaaaaaaaaaaaaaaaaaaaaaaaaaaaaaaaaaaaaaaaaaaaaaaaaaaaaaaaaaaaaaaaaaaaaaaaaaaaaaaaaaaaaaaaaaaaaaaaaaaaaaaaaaaaaaaaaaaaaaaaaaaaaaaaaaaaaaaaaaaaaaaaaaaaaaaaaaaaaaaaaaaaaaaaaaaaaaaaaaaaaaaaaaaaaaaaaaaaaaaaaaaaaaaaaaaaaaaaaaaaaaaaaaaaaaaaaaaaaaaaaaaaaaaaaaaaaaaaaaaaaaaaaaaaaaaaaaaaaaaaaaaaaaaaaaaaaaaaaaaaaaaaaaaaaaaaaaaaaaaaaaaaaaaaaaaaaaaaaaaaaaaaaaaaaaaaaaaaaaaaaaaaaaaaaaaaaaaaaaaaaaaaaaaaaaaaaaaaaaaaaaaaaaaaaaaaaaaaaaaaaaaaaaaaaaaaaaaaaaaaaaaaaaaaaaaaaaaaaaaaaaaaaaaaaaaaaaaaaaaaaaaaaaaaaaaaaaaaaaaaaaaaaaaaaaaaaaaaaaaaaaaaaaaaaaaaaaaaaaaaaaaaaaaaaaaaaaaaaaaaaaaaaaaaaaaaaaaaaaaaaaaaaaaaaaaaaaaaaaaaaaaaaaaaaaaaaaaaaaaaaaaaaaaaaaaaaaaaaaaaaaaaaaaaaaaaaaaaaaaaaaaaaaaaaaaaaaaaaaaaaaaaaaaaaaaaaaaaaaaaaaaaaaaaaaaaaaaaaaaaaaaaaaaaaaaaaaaaaaaaaaaaaaaaaaaaaaaaaaaaaaaaaaaaaaaaaaaaaaaaaaaaaaaaaaaaaaaaaaaaaaaaaaaaaaaaaaaaaaaaaaaaaaaaaaaaaaaaaaaaaaaaaaaaaaaaaaaaaaaaaaaaaaaaaaaaaaaaaaaaaaaaaaaaaaaaaaaaaaaaaaaaaaaaaaaaaaaaaaaaaaaaaaaaaaaaaaaaaaaaaaaaaaaaaaaaaaaaaaaaaaaaaaaaaaaaaaaaaaaaaaaaaaaaaaaaaaaaaaaaaaaaaaaaaaaaaaaaaaaaaaaaaaaaaaaaaaaaaaaaaaaaaaaaaaaaaaaaaaaaaaaaaaaaaaaaa

SEQ ID NO: 31 - DNA, 100 bp, Artificial Sequence
  source: /note="Description of Artificial Sequence: Synthetic polynucleotide"
tttttttttttttttttttttttttttttttttttttttttttttttttttttttttttttttttttttttttttttttttttttttttttttttttttt

SEQ ID NO: 32 - DNA, 5000 bp, Artificial Sequence
  source: /note="Description of Artificial Sequence: Synthetic polynucleotide"
  misc_feature (1)..(5000): /note="This sequence may encompass 50-5000 nucleotides"
tttttttttttttttttttttttttttttttttttttttttttttttttttttttttttttttttttttttttttttttttttttttttttttttttttttttttttttttttttttttttttttttttttttttttttttttttttttttttttttttttttttttttttttttttttttttttttttttttttttttttttttttttttttttttttttttttttttttttttttttttttttttttttttttttttttttttttttttttttttttttttttttttttttttttttttttttttttttttttttttttttttttttttttttttttttttttttttttttttttttttttttttttttttttttttttttttttttttttttttttttttttttttttttttttttttttttttttttttttttttttttttttttttttttttttttttttttttttttttttttttttttttttttttttttttttttttttttttttttttttttttttttttttttttttttttttttttttttttttttttttttttttttttttttttttttttttttttttttttttttttttttttttttttttttttttttttttttttttttttttttttttttttttttttttttttttttttttttttttttttttttttttttttttttttttttttttttttttttttttttttttttttttttttttttttttttttttttttttttttttttttttttttttttttttttttttttttttttttttttttttttttttttttttttttttttttttttttttttttttttttttttttttttttttttttttttttttttttttttttttttttttttttttttttttttttttttttttttttttttttttttttttttttttttttttttttttttttttttttttttttttttttttttttttttttttttttttttttttttttttttttttttttttttttttttttttttttttttttttttttttttttttttttttttttttttttttttttttttttttttttttttttttttttttttttttttttttttttttttttttttttttttttttttttttttttttttttttttttttttttttttttttttttttttttttttttttttttttttttttttttttttttttttttttttttttttttttttttttttttttttttttttttttttttttttttttttttttttttttttttttttttttttttttttttttttttttttttttttttttttttttttttttttttttttttttttttttttttttttttttttttttttttttttttttttttttttttttttttttttttttttttttttttttttttttttttttttttttttttttttttttttttttttttttttttttttttttttttttttttttttttttttttttttttttttttttttttttttttttttttttttttttttttttttttttttttttttttttttttttttttttttttttttttttttttttttttttttttttttttttttttttttttttttttttttttttttttttttttttttttttttttttttttttttttttttttttttttttttttttttttttttttttttttttttttttttttttttttttttttttttttttttttttttttttttttttttttttttttttttttttttttttttttttttttttttttttttttttttttttttttttttttttttttttttttttttttttttttttttttttttttttttttttttttttttttttttttttttttttttttttttttttttttttttttttttttttttttttttttttttttttttttttttttttttttttttttttttttttttttttttttttttttttttttttttttttttttttttttttttttttttttttttttttttttttttttttttttttttttttttttttttttttttttttttttttttttttttttttttttttttttttttttttttttttttttttttttttttttttttttttttttttttttttttttttttttttttttttttttttttttttttttttttttttttttttttttttttttttttttttttttttttttttttttttttttttttttttttttttttttttttttttttttttttttttttttttttttttttttttttttttttttttttttttttttttttttttttttttttttttttttttttttttttttttttttttttttttttttttttttttttttttttttttttttttttttttttttttttttttttttttttttttttttttttttttttttttttttttttttttttttttttttttttttttttttttttttttttttttttttttttttttttttttttttttttttttttttttttttttttttttttttttttttttttttttttttttttttttttttttttttttttttttttttttttttttttttttttttttttttttttttttttttttttttttttttttttttttttttttttttttttttttttttttttttttttttttttttttttttttttttttttttttttttttttttttttttttttttttttttttttttttttttttttttttttttttttttttttttttttttttttttttttttttttttttttttttttttttttttttttttttttttttttttttttttttttttttttttttttttttttttttttttttttttttttttttttttttttttttttttttttttttttttttttttttttttttttttttttttttttttttttttttttttttttttttttttttttttttttttttttttttttttttttttttttttttttttttttttttttttttttttttttttttttttttttttttttttttttttttttttttttttttttttttttttttttttttttttttttttttttttttttttttttttttttttttttttttttttttttttttttttttttttttttttttttttttttttttttttttttttttttttttttttttttttttttttttttttttttttttttttttttttttttttttttttttttttttttttttttttttttttttttttttttttttttttttttttttttttttttttttttttttttttttttttttttttttttttttttttttttttttttttttttttttttttttttttttttttttttttttttttttttttttttttttttttttttttttttttttttttttttttttttttttttttttttttttttttttttttttttttttttttttttttttttttttttttttttttttttttttttttttttttttttttttttttttttttttttttttttttttttttttttttttttttttttttttttttttttttttttttttttttttttttttttttttttttttttttttttttttttttttttttttttttttttttttttttttttttttttttttttttttttttttttttttttttttttttttttttttttttttttttttttttttttttttttttttttttttttttttttttttttttttttttttttttttttttttttttttttttttttttttttttttttttttttttttttttttttttttttttttttttttttttttttttttttttttttttttttttttttttttttttttttttttttttttttttttttttttttttttttttttttttttttttttttttttttttttttttttttttttttttttttttttttttttttttttttttttttttttttttttttttttttttttttttttttttttttttttttttttttttttttttttttttttttttttttttttttttttttttttttttttttttttttttttttttttttttttttttttttttttttttttttttttttttttttttttttttttttttttttttttttttttttttttttttttttttttttttttttttttttttttttttttttttttttttttttttttttttttttttttttttttttttttttttttttttttttttttttttttttttttttttttttttttttttttttttttttttttttttttttttttttttttttttttttttttttttttttttttttttttttttttttttttttttttttttttttttttttttttttttttttttttttttttttttttttttttttttttttttttttttttttttttttttttttttttttttttttttttttttttttttttttttttttttttttttttttttttttttttttttttttttttttttttttttttttttttttttttttttttttttttttttttttttttttttttttttttttttttttttttttttttttttttttttttttttttttttttttttttttttttttttttttttttttttttttttttttttttttttttttttttttttttttttttttttttttttttttttttttttttttttttttttttttttttttttttttttttttttttttttttttttttttttttttttttttttttttttttttttttttttttttttttttttttttttttttttttttttttttttttttttttttttttttttttttttttttttttttttttttttttttttttttttttttttttttttttttttttttttttttttttttttttttttttttttttttttttttttttttttttttttttttttttttttttttttttttttttttttttttttttttttttttttttttttttttttttttttt

SEQ ID NO: 33 - RNA, 5000 nt, Artificial Sequence; identical to SEQ ID NO: 30
  source: /note="Description of Artificial Sequence: Synthetic polynucleotide"
  misc_feature (1)..(5000): /note="This sequence may encompass 100-5000 nucleotides"

SEQ ID NO: 34 - RNA, 400 nt, Artificial Sequence
  source: /note="Description of Artificial Sequence: Synthetic polynucleotide"
  misc_feature (1)..(400): /note="This sequence may encompass 100-400 nucleotides"
  source: /note="See specification as filed for detailed description of substitutions and preferred embodiments"
aaaaaaaaaaaaaaaaaaaaaaaaaaaaaaaaaaaaaaaaaaaaaaaaaaaaaaaaaaaaaaaaaaaaaaaaaaaaaaaaaaaaaaaaaaaaaaaaaaaaaaaaaaaaaaaaaaaaaaaaaaaaaaaaaaaaaaaaaaaaaaaaaaaaaaaaaaaaaaaaaaaaaaaaaaaaaaaaaaaaaaaaaaaaaaaaaaaaaaaaaaaaaaaaaaaaaaaaaaaaaaaaaaaaaaaaaaaaaaaaaaaaaaaaaaaaaaaaaaaaaaaaaaaaaaaaaaaaaaaaaaaaaaaaaaaaaaaaaaaaaaaaaaaaaaaaaaaaaaaaaaaaaaaaaaaaaaaaaaaaaaaaaaaaaaaaaaaaaaaaaaaaaaaaaaaaaaaaaaaaaaaaaaaaaaaaaaaaaaaa

SEQ ID NO: 35 - RNA, 2000 nt, Artificial Sequence
  source: /note="Description of Artificial Sequence: Synthetic polynucleotide"
  misc_feature (1)..(2000): /note="This sequence may encompass 50-2000 nucleotides"
aaaaaaaaaaaaaaaaaaaaaaaaaaaaaaaaaaaaaaaaaaaaaaaaaaaaaaaaaaaaaaaaaaaaaaaaaaaaaaaaaaaaaaaaaaaaaaaaaaaaaaaaaaaaaaaaaaaaaaaaaaaaaaaaaaaaaaaaaaaaaaaaaaaaaaaaaaaaaaaaaaaaaaaaaaaaaaaaaaaaaaaaaaaaaaaaaaaaaaaaaaaaaaaaaaaaaaaaaaaaaaaaaaaaaaaaaaaaaaaaaaaaaaaaaaaaaaaaaaaaaaaaaaaaaaaaaaaaaaaaaaaaaaaaaaaaaaaaaaaaaaaaaaaaaaaaaaaaaaaaaaaaaaaaaaaaaaaaaaaaaaaaaaaaaaaaaaaaaaaaaaaaaaaaaaaaaaaaaaaaaaaaaaaaaaaaaaaaaaaaaaaaaaaaaaaaaaaaaaaaaaaaaaaaaaaaaaaaaaaaaaaaaaaaaaaaaaaaaaaaaaaaaaaaaaaaaaaaaaaaaaaaaaaaaaaaaaaaaaaaaaaaaaaaaaaaaaaaaaaaaaaaaaaaaaaaaaaaaaaaaaaaaaaaaaaaaaaaaaaaaaaaaaaaaaaaaaaaaaaaaaaaaaaaaaaaaaaaaaaaaaaaaaaaaaaaaaaaaaaaaaaaaaaaaaaaaaaaaaaaaaaaaaaaaaaaaaaaaaaaaaaaaaaaaaaaaaaaaaaaaaaaaaaaaaaaaaaaaaaaaaaaaaaaaaaaaaaaaaaaaaaaaaaaaaaaaaaaaaaaaaaaaaaaaaaaaaaaaaaaaaaaaaaaaaaaaaaaaaaaaaaaaaaaaaaaaaaaaaaaaaaaaaaaaaaaaaaaaaaaaaaaaaaaaaaaaaaaaaaaaaaaaaaaaaaaaaaaaaaaaaaaaaaaaaaaaaaaaaaaaaaaaaaaaaaaaaaaaaaaaaaaaaaaaaaaaaaaaaaaaaaaaaaaaaaaaaaaaaaaaaaaaaaaaaaaaaaaaaaaaaaaaaaaaaaaaaaaaaaaaaaaaaaaaaaaaaaaaaaaaaaaaaaaaaaaaaaaaaaaaaaaaaaaaaaaaaaaaaaaaaaaaaaaaaaaaaaaaaaaaaaaaaaaaaaaaaaaaaaaaaaaaaaaaaaaaaaaaaaaaaaaaaaaaaaaaaaaaaaaaaaaaaaaaaaaaaaaaaaaaaaaaaaaaaaaaaaaaaaaaaaaaaaaaaaaaaaaaaaaaaaaaaaaaaaaaaaaaaaaaaaaaaaaaaaaaaaaaaaaaaaaaaaaaaaaaaaaaaaaaaaaaaaaaaaaaaaaaaaaaaaaaaaaaaaaaaaaaaaaaaaaaaaaaaaaaaaaaaaaaaaaaaaaaaaaaaaaaaaaaaaaaaaaaaaaaaaaaaaaaaaaaaaaaaaaaaaaaaaaaaaaaaaaaaaaaaaaaaaaaaaaaaaaaaaaaaaaaaaaaaaaaaaaaaaaaaaaaaaaaaaaaaaaaaaaaaaaaaaaaaaaaaaaaaaaaaaaaaaaaaaaaaaaaaaaaaaaaaaaaaaaaaaaaaaaaaaaaaaaaaaaaaaaaaaaaaaaaaaaaaaaaaaaaaaaaaaaaaaaaaaaaaaaaaaaaaaaaaaaaaaaaaaaaaaaaaaaaaaaaaaaaaaaaaaaaaaaaaaaaaaaaaaaaaaaaaaaaaaaaaaaaaaaaaaaaaaaaaaaaaaaaaaaaaaaaaaaaaaaaaaaaaaaaaaaaaaaaaaaaaaaaaaaaaaaaaaaaaaaaaaaaaaaaaaaaaaaaaaaaaaaaaaaaaaaaaaaaaaaaaaaaaaaaaaaaaaaaaaaaaaaaaaaaaaaaaaaaaaaaaaaaaaaaaaaaaaaaaaaaaaaaaaaaaaaaaaaaaaaaaaaaaaaaaaaaaaaaaaaaaaaaaaaaaaaaaaaaaaaaaaaaaaaaaaaaaaaaaaaaaaaaaaaaaaaaaaaaaaaaaaaaaaaaaaaaaaaaaaaaaaaaaaaaaaaaaaaaaaaaaaaaaaaaaaaaaaaaaaaaaaaaaaaaaaaaaaaaaaaaaaaaaaaaaaaaaaaaaaa

SEQ ID NO: 36 - protein, 41 aa, Artificial Sequence
  source: /note="Description of Artificial Sequence: Synthetic polypeptide"
RSKRSRLLHSDYMNMTPRRPGPTRKHYQPYAPPRDFAAYRS

SEQ ID NO: 37 - DNA, 123 bp, Artificial Sequence; identical to SEQ ID NO: 19
  source: /note="Description of Artificial Sequence: Synthetic polynucleotide"

SEQ ID NO: 38 - protein, 35 aa, Artificial Sequence
  source: /note="Description of Artificial Sequence: Synthetic polypeptide"
TKKKYSSSVHDPNGEYMFMRAVNTAKKSRLTDVTL

SEQ ID NO: 39 - DNA, 105 bp, Artificial Sequence
  source: /note="Description of Artificial Sequence: Synthetic polynucleotide"
acaaaaaagaagtattcatccagtgtgcacgaccctaacggtgaatacatgttcatgagagcagtgaacacagccaaaaaatccagactcacagatgtgacccta

SEQ ID NO: 40 - DNA, 30 bp, Artificial Sequence
  source: /note="Description of Artificial Sequence: Synthetic oligonucleotide"
ggtggcggaggttctggaggtgggggttcc

SEQ ID NO: 41 - protein, 4 aa, Artificial Sequence
  source: /note="Description of Artificial Sequence: Synthetic peptide"
  source: /note="See specification as filed for detailed description of substitutions and preferred embodiments"
GGGS

SEQ ID NO: 42 - protein, 40 aa, Artificial Sequence
  source: /note="Description of Artificial Sequence: Synthetic polypeptide"
  SITE (1)..(40): /note="This sequence may encompass 1-10 'Gly Gly Gly Ser' repeating units"
GGGSGGGSGGGSGGGSGGGSGGGSGGGSGGGSGGGSGGGS

SEQ ID NO: 43 - protein, 18 aa, Artificial Sequence
  source: /note="Description of Artificial Sequence: Synthetic peptide"
GSTSGSGKPGSGEGSTKG

SEQ ID NO: 44 - protein, 5 aa, Artificial Sequence
  source: /note="Description of Artificial Sequence: Synthetic peptide"
SYAMS

SEQ ID NO: 45 - protein, 17 aa, Artificial Sequence
  source: /note="Description of Artificial Sequence: Synthetic peptide"
AISGSGGSTYYADSVKG

SEQ ID NO: 46 - protein, 14 aa, Artificial Sequence
  source: /note="Description of Artificial Sequence: Synthetic peptide"
REWVPYDVSWYFDY

SEQ ID NO: 47 - protein, 7 aa, Artificial Sequence
  source: /note="Description of Artificial Sequence: Synthetic peptide"
GFTFSSY

SEQ ID NO: 48 - protein, 6 aa, Artificial Sequence
  source: /note="Description of Artificial Sequence: Synthetic peptide"
SGSGGS

SEQ ID NO: 49 - protein, 8 aa, Artificial Sequence
  source: /note="Description of Artificial Sequence: Synthetic peptide"
GFTFSSYA

SEQ ID NO: 50 - protein, 8 aa, Artificial Sequence
  source: /note="Description of Artificial Sequence: Synthetic peptide"
ISGSGGST

SEQ ID NO: 51 - protein, 16 aa, Artificial Sequence
  source: /note="Description of Artificial Sequence: Synthetic peptide"
ARREWVPYDVSWYFDY

SEQ ID NO: 52 - protein, 123 aa, Artificial Sequence
  source: /note="Description of Artificial Sequence: Synthetic polypeptide"
EVQLLESGGGLVQPGGSLRLSCAASGFTFSSYAMSWVRQAPGKGLEWVSAISGSGGSTYYADSVKGRFTISRDNSKNTLYLQMNSLRAEDTAVYYCARREWVPYDVSWYFDYWGQGTLVTVSS

SEQ ID NO: 53 - DNA, 369 bp, Artificial Sequence
  source: /note="Description of Artificial Sequence: Synthetic polynucleotide"
gaagtgcagttgctggagtcaggcggaggactggtgcagcccggaggatcgcttcgcttgagctgcgcagcctcaggctttaccttctcctcctacgccatgtcctgggtcagacaggctcccgggaagggactggaatgggtgtccgccattagcggttccggcggaagcacttactatgccgactctgtgaagggccgcttcactatctcccgggacaactccaagaacaccctgtatctccaaatgaattccctgagggccgaagataccgcggtgtactactgcgctagacgggagtgggtgccctacgatgtcagctggtacttcgactactggggacagggcactctcgtgactgtgtcctcc

SEQ ID NO: 54 - protein, 11 aa, Artificial Sequence
  source: /note="Description of Artificial Sequence: Synthetic peptide"
RASQSISSYLN

SEQ ID NO: 55 - protein, 7 aa, Artificial Sequence
  source: /note="Description of Artificial Sequence: Synthetic peptide"
AASSLQS

SEQ ID NO: 56 - protein, 9 aa, Artificial Sequence
  source: /note="Description of Artificial Sequence: Synthetic peptide"
QQSYSTPLT

SEQ ID NO: 57 - protein, 7 aa, Artificial Sequence
  source: /note="Description of Artificial Sequence: Synthetic peptide"
SQSISSY

SEQ ID NO: 58 - protein, 3 aa, Artificial Sequence
  source: /note="Description of Artificial Sequence: Synthetic peptide"
AAS

SEQ ID NO: 59 - protein, 6 aa, Artificial Sequence
  source: /note="Description of Artificial Sequence: Synthetic peptide"
SYSTPL

SEQ ID NO: 60 - protein, 6 aa, Artificial Sequence
  source: /note="Description of Artificial Sequence: Synthetic peptide"
QSISSY

SEQ ID NO: 61 - protein, 107 aa, Artificial Sequence [sequence omitted]

SEQ ID NO: 62 - DNA, 321 bp, Artificial Sequence
  source: /note="Description of Artificial Sequence: Synthetic polynucleotide"
gacattcaaatgactcagtccccgtcctccctctccgcctccgtgggagatcgcgtcacgatcacgtgcagggccagccagagcatctccagctacctgaactggtaccagcagaagccagggaaggcaccgaagctcctgatctacgccgctagctcgctgcagtccggcgtcccttcacggttctcgggatcgggctcaggcaccgacttcaccctgaccattagcagcctgcagccggaggacttcgcgacatactactgtcagcagtcatactccacccctctgaccttcggccaagggaccaaagtggagatcaag

SEQ ID NO: 63 - protein, 20 aa, Artificial Sequence
  source: /note="Description of Artificial Sequence: Synthetic peptide"
GGGGSGGGGSGGGGSGGGGS

SEQ ID NO: 64 - protein, 250 aa, Artificial Sequence
  source: /note="Description of Artificial Sequence: Synthetic polypeptide"
EVQLLESGGGLVQPGGSLRLSCAASGFTFSSYAMSWVRQAPGKGLEWVSAISGSGGSTYYADSVKGRFTISRDNSKNTLYLQMNSLRAEDTAVYYCARREWVPYDVSWYFDYWGQGTLVTVSSGGGGSGGGGSGGGGSGGGGSDIQMTQSPSSLSASVGDRVTITCRASQSISSYLNWYQQKPGKAPKLLIYAASSLQSGVPSRFSGSGSGTDFTLTISSLQPEDFATYYCQQSYSTPLTFGQGTKVEIK

SEQ ID NO: 65 - DNA, 750 bp, Artificial Sequence
  source: /note="Description of Artificial Sequence: Synthetic polynucleotide"
gaagtgcagttgctggagtcaggcggaggactggtgcagcccggaggatcgcttcgcttgagctgcgcagcctcaggctttaccttctcctcctacgccatgtcctgggtcagacaggctcccgggaagggactggaatgggtgtccgccattagcggttccggcggaagcacttactatgccgactctgtgaagggccgcttcactatctcccgggacaactccaagaacaccctgtatctccaaatgaattccctgagggccgaagataccgcggtgtactactgcgctagacgggagtgggtgccctacgatgtcagctggtacttcgactactggggacagggcactctcgtgactgtgtcctccggtggtggtggatcggggggtggtggttcgggcggaggaggatctggaggaggagggtcggacattcaaatgactcagtccccgtcctccctctccgcctccgtgggagatcgcgtcacgatcacgtgcagggccagccagagcatctccagctacctgaactggtaccagcagaagccagggaaggcaccgaagctcctgatctacgccgctagctcgctgcagtccggcgtcccttcacggttctcgggatcgggctcaggcaccgacttcaccctgaccattagcagcctgcagccggaggacttcgcgacatactactgtcagcagtcatactccacccctctgaccttcggccaagggaccaaagtggagatcaag

SEQ ID NO: 66 - protein, 473 aa, Artificial Sequence
  source: /note="Description of Artificial Sequence: Synthetic polypeptide"
EVQLLESGGGLVQPGGSLRLSCAASGFTFSSYAMSWVRQAPGKGLEWVSAISGSGGSTYYADSVKGRFTISRDNSKNTLYLQMNSLRAEDTAVYYCARREWVPYDVSWYFDYWGQGTLVTVSSGGGGSGGGGSGGGGSGGGGSDIQMTQSPSSLSASVGDRVTITCRASQSISSYLNWYQQKPGKAPKLLIYAASSLQSGVPSRFSGSGSGTDFTLTISSLQPEDFATYYCQQSYSTPLTFGQGTKVEIKTTTPAPRPPTPAPTIASQPLSLRPEACRPAAGGAVHTRGLDFACDIYIWAPLAGTCGVLLLSLVITLYCKRGRKKLLYIFKQPFMRPVQTTQEEDGCSCRFPEEEEGGCELRVKFSRSADAPAYQQGQNQLYNELNLGRREEYDVLDKRRGRDPEMGGKPRRKNPQEGLYNELQKDKMAEAYSEIGMKGERRRGKGHDGLYQGLSTATKDTYDALHMQALPPR

SEQ ID NO: 67 - DNA, 1419 bp, Artificial Sequence
  source: /note="Description of Artificial Sequence: Synthetic polynucleotide"
gaagtgcagttgctggagtcaggcggaggactggtgcagcccggaggatcgcttcgcttgagctgcgcagcctcaggctttaccttctcctcctacgccatgtcctgggtcagacaggctcccgggaagggactggaatgggtgtccgccattagcggttccggcggaagcacttactatgccgactctgtgaagggccgcttcactatctcccgggacaactccaagaacaccctgtatctccaaatgaattccctgagggccgaagataccgcggtgtactactgcgctagacgggagtgggtgccctacgatgtcagctggtacttcgactactggggacagggcactctcgtgactgtgtcctccggtggtggtggatcggggggtggtggttcgggcggaggaggatctggaggaggagggtcggacattcaaatgactcagtccccgtcctccctctccgcctccgtgggagatcgcgtcacgatcacgtgcagggccagccagagcatctccagctacctgaactggtaccagcagaagccagggaaggcaccgaagctcctgatctacgccgctagctcgctgcagtccggcgtcccttcacggttctcgggatcgggctcaggcaccgacttcaccctgaccattagcagcctgcagccggaggacttcgcgacatactactgtcagcagtcatactccacccctctgaccttcggccaagggaccaaagtggagatcaagaccactaccccagcaccgaggccacccaccccggctcctaccatcgcctcccagcctctgtccctgcgtccggaggcatgtagacccgcagctggtggggccgtgcatacccggggtcttgacttcgcctgcgatatctacatttgggcccctctggctggtacttgcggggtcctgctgctttcactcgtgatcactctttactgtaagcgcggtcggaagaagctgctgtacatctttaagcaacccttcatgaggcctgtgcagactactcaagaggaggacggctgttcatgccggttcccagaggaggaggaaggcggctgcgaactgcgcgtgaaattcagccgcagcgcagatgctccagcctaccagcaggggcagaaccagctctacaacgaactcaatcttggtcggagagaggagtacgacgtgctggacaagcggagaggacgggacccagaaatgggcgggaagccgcgcagaaagaatccccaagagggcctgtacaacgagctccaaaaggataagatggcagaagcctatagcgagattggtatgaaaggggaacgcagaagaggcaaaggccacgacggactgtaccagggactcagcaccgccaccaaggacacctatgacgctcttcacatgcaggccctgccgcctcgg

SEQ ID NO: 68 - protein, 12 aa, Artificial Sequence
  source: /note="Description of Artificial Sequence: Synthetic peptide"
REWWYDDWYLDY

SEQ ID NO: 69 - protein, 14 aa, Artificial Sequence
  source: /note="Description of Artificial Sequence: Synthetic peptide"
ARREWWYDDWYLDY

SEQ ID NO: 70 - protein, 121 aa, Artificial Sequence
  source: /note="Description of Artificial Sequence: Synthetic polypeptide"
EVQLLESGGGLVQPGGSLRLSCAASGFTFSSYAMSWVRQAPGKGLEWVSAISGSGGSTYYADSVKGRFTISRDNSKNTLYLQMNSLRAEDTAVYYCARREWWYDDWYLDYWGQGTLVTVSS

SEQ ID NO: 71 - DNA, 363 bp, Artificial Sequence
  source: /note="Description of Artificial Sequence: Synthetic polynucleotide"
gaagtgcagttgctggagtcaggcggaggactggtgcagcccggaggatcgcttcgcttgagctgcgcagcctcaggctttaccttctcctcctacgccatgtcctgggtcagacaggctcccgggaagggactggaatgggtgtccgccattagcggttccggcggaagcacttactatgccgactctgtgaagggccgcttcactatctcccgggacaactccaagaacaccctgtatctccaaatgaattccctgagggccgaagataccgcggtgtactactgcgctagacgggagtggtggtacgacgattggtacctggactactggggacagggcactctcgtgactgtgtcctcc

SEQ ID NO: 72 - protein, 248 aa, Artificial Sequence
  source: /note="Description of Artificial Sequence: Synthetic polypeptide"
EVQLLESGGGLVQPGGSLRLSCAASGFTFSSYAMSWVRQAPGKGLEWVSAISGSGGSTYYADSVKGRFTISRDNSKNTLYLQMNSLRAEDTAVYYCARREWWYDDWYLDYWGQGTLVTVSSGGGGSGGGGSGGGGSGGGGSDIQMTQSPSSLSASVGDRVTITCRASQSISSYLNWYQQKPGKAPKLLIYAASSLQSGVPSRFSGSGSGTDFTLTISSLQPEDFATYYCQQSYSTPLTFGQGTKVEIK

SEQ ID NO: 73 - DNA, 744 bp, Artificial Sequence
  source: /note="Description of Artificial Sequence: Synthetic polynucleotide"
gaagtgcagttgctggagtcaggcggaggactggtgcagcccggaggatcgcttcgcttgagctgcgcagcctcaggctttaccttctcctcctacgccatgtcctgggtcagacaggctcccgggaagggactggaatgggtgtccgccattagcggttccggcggaagcacttactatgccgactctgtgaagggccgcttcactatctcccgggacaactccaagaacaccctgtatctccaaatgaattccctgagggccgaagataccgcggtgtactactgcgctagacgggagtggtggtacgacgattggtacctggactactggggacagggcactctcgtgactgtgtcctccggtggtggtggatcggggggtggtggttcgggcggaggaggatctggaggaggagggtcggacattcaaatgactcagtccccgtcctccctctccgcctccgtgggagatcgcgtcacgatcacgtgcagggccagccagagcatctccagctacctgaactggtaccagcagaagccagggaaggcaccgaagctcctgatctacgccgctagctcgctgcagtccggcgtcccttcacggttctcgggatcgggctcaggcaccgacttcaccctgaccattagcagcctgcagccggaggacttcgcgacatactactgtcagcagtcatactccacccctctgaccttcggccaagggaccaaagtggagatcaag

SEQ ID NO: 74 - protein, 471 aa, Artificial Sequence
  source: /note="Description of Artificial Sequence: Synthetic polypeptide"
EVQLLESGGGLVQPGGSLRLSCAASGFTFSSYAMSWVRQAPGKGLEWVSAISGSGGSTYYADSVKGRFTISRDNSKNTLYLQMNSLRAEDTAVYYCARREWWYDDWYLDYWGQGTLVTVSSGGGGSGGGGSGGGGSGGGGSDIQMTQSPSSLSASVGDRVTITCRASQSISSYLNWYQQKPGKAPKLLIYAASSLQSGVPSRFSGSGSGTDFTLTISSLQPEDFATYYCQQSYSTPLTFGQGTKVEIKTTTPAPRPPTPAPTIASQPLSLRPEACRPAAGGAVHTRGLDFACDIYIWAPLAGTCGVLLLSLVITLYCKRGRKKLLYIFKQPFMRPVQTTQEEDGCSCRFPEEEEGGCELRVKFSRSADAPAYQQGQNQLYNELNLGRREEYDVLDKRRGRDPEMGGKPRRKNPQEGLYNELQKDKMAEAYSEIGMKGERRRGKGHDGLYQGLSTATKDTYDALHMQALPPR

SEQ ID NO: 75 - DNA, 1413 bp, Artificial Sequence
  source: /note="Description of Artificial Sequence: Synthetic polynucleotide"
gaagtgcagttgctggagtcaggcggaggactggtgcagcccggaggatcgcttcgcttgagctgcgcagcctcaggctttaccttctcctcctacgccatgtcctgggtcagacaggctcccgggaagggactggaatgggtgtccgccattagcggttccggcggaagcacttactatgccgactctgtgaagggccgcttcactatctcccgggacaactccaagaacaccctgtatctccaaatgaattccctgagggccgaagataccgcggtgtactactgcgctagacgggagtggtggtacgacgattggtacctggactactggggacagggcactctcgtgactgtgtcctccggtggtggtggatcggggggtggtggttcgggcggaggaggatctggaggaggagggtcggacattcaaatgactcagtccccgtcctccctctccgcctccgtgggagatcgcgtcacgatcacgtgcagggccagccagagcatctccagctacctgaactggtaccagcagaagccagggaaggcaccgaagctcctgatctacgccgctagctcgctgcagtccggcgtcccttcacggttctcgggatcgggctcaggcaccgacttcaccctgaccattagcagcctgcagccggaggacttcgcgacatactactgtcagcagtcatactccacccctctgaccttcggccaagggaccaaagtggagatcaagaccactaccccagcaccgaggccacccaccccggctcctaccatcgcctcccagcctctgtccctgcgtccggaggcatgtagacccgcagctggtggggccgtgcatacccggggtcttgacttcgcctgcgatatctacatttgggcccctctggctggtacttgcggggtcctgctgctttcactcgtgatcactctttactgtaagcgcggtcggaagaagctgctgtacatctttaagcaacccttcatgaggcctgtgcagactactcaagaggaggacggctgttcatgccggttcccagaggaggaggaaggcggctgcgaactgcgcgtgaaattcagccgcagcgcagatgctccagcctaccagcaggggcagaaccagctctacaacgaactcaatcttggtcggagagaggagtacgacgtgctggacaagcggagaggacgggacccagaaatgggcgggaagccgcgcagaaagaatccccaagagggcctgtacaacgagctccaaaaggataagatggcagaagcctatagcgagattggtatgaaaggggaacgcagaagaggcaaaggccacgacggactgtaccagggactcagcaccgccaccaaggacacctatgacgctcttcacatgcaggccctgccgcctcgg

SEQ ID NO: 76 - protein, 12 aa, Artificial Sequence
  source: /note="Description of Artificial Sequence: Synthetic peptide"
REWWGESWLFDY

SEQ ID NO: 77 - protein, 14 aa, Artificial Sequence
  source: /note="Description of Artificial Sequence: Synthetic peptide"
ARREWWGESWLFDY

SEQ ID NO: 78 - protein, 121 aa, Artificial Sequence
  source: /note="Description of Artificial Sequence: Synthetic polypeptide"
EVQLLESGGGLVQPGGSLRLSCAASGFTFSSYAMSWVRQAPGKGLEWVSAISGSGGSTYYADSVKGRFTISRDNSKNTLYLQMNSLRAEDTAVYYCARREWWGESWLFDYWGQGTLVTVSS

SEQ ID NO: 79 - DNA, 363 bp, Artificial Sequence
  source: /note="Description of Artificial Sequence: Synthetic polynucleotide"
gaagtgcagttgctggagtcaggcggaggactggtgcagcccggaggatcgcttcgcttgagctgcgcagcctcaggctttaccttctcctcctacgccatgtcctgggtcagacaggctcccgggaagggactggaatgggtgtccgccattagcggttccggcggaagcacttactatgccgactctgtgaagggccgcttcactatctcccgggacaactccaagaacaccctgtatctccaaatgaattccctgagggccgaagataccgcggtgtactactgcgctagacgggagtggtggggagaaagctggctgttcgactactggggacagggcactctcgtgactgtgtcctcc

SEQ ID NO: 80 - protein, 248 aa, Artificial Sequence
  source: /note="Description of Artificial Sequence: Synthetic polypeptide"
EVQLLESGGGLVQPGGSLRLSCAASGFTFSSYAMSWVRQAPGKGLEWVSAISGSGGSTYYADSVKGRFTISRDNSKNTLYLQMNSLRAEDTAVYYCARREWWGESWLFDYWGQGTLVTVSSGGGGSGGGGSGGGGSGGGGSDIQMTQSPSSLSASVGDRVTITCRASQSISSYLNWYQQKPGKAPKLLIYAASSLQSGVPSRFSGSGSGTDFTLTISSLQPEDFATYYCQQSYSTPLTFGQGTKVEIK

SEQ ID NO: 81 - DNA, 744 bp, Artificial Sequence
  source: /note="Description of Artificial Sequence: Synthetic polynucleotide"
gaagtgcagttgctggagtcaggcggaggactggtgcagcccggaggatcgcttcgcttgagctgcgcagcctcaggctttaccttctcctcctacgccatgtcctgggtcagacaggctcccgggaagggactggaatgggtgtccgccattagcggttccggcggaagcacttactatgccgactctgtgaagggccgcttcactatctcccgggacaactccaagaacaccctgtatctccaaatgaattccctgagggccgaagataccgcggtgtactactgcgctagacgggagtggtggggagaaagctggctgttcgactactggggacagggcactctcgtgactgtgtcctccggtggtggtggatcggggggtggtggttcgggcggaggaggatctggaggaggagggtcggacattcaaatgactcagtccccgtcctccctctccgcctccgtgggagatcgcgtcacgatcacgtgcagggccagccagagcatctccagctacctgaactggtaccagcagaagccagggaaggcaccgaagctcctgatctacgccgctagctcgctgcagtccggcgtcccttcacggttctcgggatcgggctcaggcaccgacttcaccctgaccattagcagcctgcagccggaggacttcgcgacatactactgtcagcagtcatactccacccctctgaccttcggccaagggaccaaagtggagatcaag

SEQ ID NO: 82 - protein, 471 aa, Artificial Sequence
  source: /note="Description of Artificial Sequence: Synthetic polypeptide"
EVQLLESGGGLVQPGGSLRLSCAASGFTFSSYAMSWVRQAPGKGLEWVSAISGSGGSTYYADSVKGRFTISRDNSKNTLYLQMNSLRAEDTAVYYCARREWWGESWLFDYWGQGTLVTVSSGGGGSGGGGSGGGGSGGGGSDIQMTQSPSSLSASVGDRVTITCRASQSISSYLNWYQQKPGKAPKLLIYAASSLQSGVPSRFSGSGSGTDFTLTISSLQPEDFATYYCQQSYSTPLTFGQGTKVEIKTTTPAPRPPTPAPTIASQPLSLRPEACRPAAGGAVHTRGLDFACDIYIWAPLAGTCGVLLLSLVITLYCKRGRKKLLYIFKQPFMRPVQTTQEEDGCSCRFPEEEEGGCELRVKFSRSADAPAYQQGQNQLYNELNLGRREEYDVLDKRRGRDPEMGGKPRRKNPQEGLYNELQKDKMAEAYSEIGMKGERRRGKGHDGLYQGLSTATKDTYDALHMQALPPR

SEQ ID NO: 83 - DNA, 1413 bp, Artificial Sequence
  source: /note="Description of Artificial Sequence: Synthetic polynucleotide"
gaagtgcagttgctggagtcaggcggaggactggtgcagcccggaggatcgcttcgcttgagctgcgcagcctcaggctttaccttctcctcctacgccatgtcctgggtcagacaggctcccgggaagggactggaatgggtgtccgccattagcggttccggcggaagcacttactatgccgactctgtgaagggccgcttcactatctcccgggacaactccaagaacaccctgtatctccaaatgaattccctgagggccgaagataccgcggtgtactactgcgctagacgggagtggtggggagaaagctggctgttcgactactggggacagggcactctcgtgactgtgtcctccggtggtggtggatcggggggtggtggttcgggcggaggaggatctggaggaggagggtcggacattcaaatgactcagtccccgtcctccctctccgcctccgtgggagatcgcgtcacgatcacgtgcagggccagccagagcatctccagctacctgaactggtaccagcagaagccagggaaggcaccgaagctcctgatctacgccgctagctcgctgcagtccggcgtcccttcacggttctcgggatcgggctcaggcaccgacttcaccctgaccattagcagcctgcagccggaggacttcgcgacatactactgtcagcagtcatactccacccctctgaccttcggccaagggaccaaagtggagatcaagaccactaccccagcaccgaggccacccaccccggctcctaccatcgcctcccagcctctgtccctgcgtccggaggcatgtagacccgcagctggtggggccgtgcatacccggggtcttgacttcgcctgcgatatctacatttgggcccctctggctggtacttgcggggtcctgctgctttcactcgtgatcactctttactgtaagcgcggtcggaagaagctgctgtacatctttaagcaacccttcatgaggcctgtgcagactactcaagaggaggacggctgttcatgccggttcccagaggaggaggaaggcggctgcgaactgcgcgtgaaattcagccgcagcgcagatgctccagcctaccagcaggggcagaaccagctctacaacgaactcaatcttggtcggagagaggagtacgacgtgctggacaagcggagaggacgggacccagaaatgggcgggaagccgcgcagaaagaatccccaagagggcctgtacaacgagctccaaaaggataagatggcagaagcctatagcgagattggtatgaaaggggaacgcagaagaggcaaaggccacgacggactgtaccagggactcagcaccgccaccaaggacacctatgacgctcttcacatgcaggccctgccgcctcgg

SEQ ID NO: 84 - protein, 14 aa, Artificial Sequence
  source: /note="Description of Artificial Sequence: Synthetic peptide"
  VARIANT (4)..(4): /replace=" "
  VARIANT (5)..(5): /replace=" "
  VARIANT (6)..(6): /replace="Tyr"
  VARIANT (7)..(7): /replace="Tyr" or "Asp"
  VARIANT (8)..(8): /replace="Asp" or "Val"
  VARIANT (9)..(9): /replace="Asp"
  VARIANT (11)..(11): /replace="Tyr"
  VARIANT (12)..(12): /replace="Leu"
  SITE (1)..(14): /note="Variant residues given in the sequence have no preference with respect to those in the annotations for variant positions"
REWVPWGESWLFDY

SEQ ID NO: 85 - protein, 16 aa, Artificial Sequence
  source: /note="Description of Artificial Sequence: Synthetic peptide"
  VARIANT (6)..(6): /replace=" "
  VARIANT (7)..(7): /replace=" "
  VARIANT (8)..(8): /replace="Tyr"
  VARIANT (9)..(9): /replace="Tyr" or "Asp"
  VARIANT (10)..(10): /replace="Asp" or "Val"
  VARIANT (11)..(11): /replace="Asp"
  VARIANT (13)..(13): /replace="Tyr"
  VARIANT (14)..(14): /replace="Leu"
  SITE (1)..(16): /note="Variant residues given in the sequence have no preference with respect to those in the annotations for variant positions"
ARREWVPWGESWLFDY

SEQ ID NO: 86 - protein, 5 aa, Artificial Sequence
  source: /note="Description of Artificial Sequence: Synthetic peptide"
SYGMH

SEQ ID NO: 87 - protein, 17 aa, Artificial Sequence
  source: /note="Description of Artificial Sequence: Synthetic peptide"
VISYDGSNKYYADSVKG

SEQ ID NO: 88 - protein, 14 aa, Artificial Sequence
  source: /note="Description of Artificial Sequence: Synthetic peptide"
SGYALHDDYYGLDV

SEQ ID NO: 89 - protein, 6 aa, Artificial Sequence
  source: /note="Description of Artificial Sequence: Synthetic peptide"
SYDGSN

SEQ ID NO: 90 - protein, 8 aa, Artificial Sequence
  source: /note="Description of Artificial Sequence: Synthetic peptide"
GFTFSSYG

SEQ ID NO: 91 - protein, 8 aa, Artificial Sequence
  source: /note="Description of Artificial Sequence: Synthetic peptide"
ISYDGSNK

SEQ ID NO: 92 - protein, 16 aa, Artificial Sequence
  source: /note="Description of Artificial Sequence: Synthetic peptide"
GGSGYALHDDYYGLDV

SEQ ID NO: 93 - protein, 123 aa, Artificial Sequence
  source: /note="Description of Artificial Sequence: Synthetic polypeptide"
QVQLQESGGGVVQPGRSLRLSCAASGFTFSSYGMHWVRQAPGKGLEWVAVISYDGSNKYYADSVKGRFTISRDNSKNTLYLQMNSLRAEDTAVYYCGGSGYALHDDYYGLDVWGQGTLVTVSS

SEQ ID NO: 94 - DNA, 369 bp, Artificial Sequence
  source: /note="Description of Artificial Sequence: Synthetic polynucleotide"
caagtgcagctgcaggaatccggtggcggagtcgtgcagcctggaaggagcctgagactctcatgcgccgcgtcagggttcaccttttcctcctacgggatgcattgggtcagacaggcccccggaaagggactcgaatgggtggctgtgatcagctacgacggctccaacaagtactacgccgactccgtgaaaggccggttcactatctcccgggacaactccaagaacacgctgtatctgcaaatgaattcactgcgcgcggaggataccgctgtgtactactgcggtggctccggttacgccctgcacgatgactattacggccttgacgtctggggccagggaaccctcgtgactgtgtccagc

SEQ ID NO: 95 - protein, 14 aa, Artificial Sequence
  source: /note="Description of Artificial Sequence: Synthetic peptide"
TGTSSDVGGYNYVS

SEQ ID NO: 96 - protein, 7 aa, Artificial Sequence
  source: /note="Description of Artificial Sequence: Synthetic peptide"
DVSNRPS

SEQ ID NO: 97 - protein, 11 aa, Artificial Sequence
  source: /note="Description of Artificial Sequence: Synthetic peptide"
SSYTSSSTLYV

SEQ ID NO: 98 - protein, 10 aa, Artificial Sequence
  source: /note="Description of Artificial Sequence: Synthetic peptide"
TSSDVGGYNY

SEQ ID NO: 99 - protein, 3 aa, Artificial Sequence
  source: /note="Description of Artificial Sequence: Synthetic peptide"
DVS

SEQ ID NO: 100 - protein, 8 aa, Artificial Sequence
  source: /note="Description of Artificial Sequence: Synthetic peptide"
YTSSSTLY

SEQ ID NO: 101 - protein, 9 aa, Artificial Sequence
  source: /note="Description of Artificial Sequence: Synthetic peptide"
SSDVGGYNY

SEQ ID NO: 102 - protein, 111 aa, Artificial Sequence
  source: /note="Description of Artificial Sequence: Synthetic polypeptide"
QSALTQPASVSGSPGQSITISCTGTSSDVGGYNYVSWYQQHPGKAPKLMIYDVSNRPSGVSNRFSGSKSGNTASLTISGLQAEDEADYYCSSYTSSSTLYVFGSGTKVTVL

SEQ ID NO: 103 - DNA, 333 bp, Artificial Sequence
  source: /note="Description of Artificial Sequence: Synthetic polynucleotide"
cagagcgcactgactcagccggcatccgtgtccggtagccccggacagtcgattaccatctcctgtaccggcacctcctccgacgtgggagggtacaactacgtgtcgtggtaccagcagcacccaggaaaggcccctaagttgatgatctacgatgtgtcaaaccgcccgtctggagtctccaaccggttctccggctccaagtccggcaacaccgccagcctgaccattagcgggctgcaagccgaggatgaggccgactactactgctcgagctacacatcctcgagcaccctctacgtgttcggctcggggactaaggtcaccgtgctg

SEQ ID NO: 104 - protein, 15 aa, Artificial Sequence
  source: /note="Description of Artificial Sequence: Synthetic peptide"
GGGGSGGGGSGGGGS

SEQ ID NO: 105 - protein, 249 aa, Artificial Sequence
  source: /note="Description of Artificial Sequence: Synthetic polypeptide"
QVQLQESGGGVVQPGRSLRLSCAASGFTFSSYGMHWVRQAPGKGLEWVAVISYDGSNKYYADSVKGRFTISRDNSKNTLYLQMNSLRAEDTAVYYCGGSGYALHDDYYGLDVWGQGTLVTVSSGGGGSGGGGSGGGGSQSALTQPASVSGSPGQSITISCTGTSSDVGGYNYVSWYQQHPGKAPKLMIYDVSNRPSGVSNRFSGSKSGNTASLTISGLQAEDEADYYCSSYTSSSTLYVFGSGTKVTVL

SEQ ID NO: 106 - DNA, 747 bp, Artificial Sequence
  source: /note="Description of Artificial Sequence: Synthetic polynucleotide"
caagtgcagctgcaggaatccggtggcggagtcgtgcagcctggaaggagcctgagactctcatgcgccgcgtcagggttcaccttttcctcctacgggatgcattgggtcagacaggcccccggaaagggactcgaatgggtggctgtgatcagctacgacggctccaacaagtactacgccgactccgtgaaaggccggttcactatctcccgggacaactccaagaacacgctgtatctgcaaatgaattcactgcgcgcggaggataccgctgtgtactactgcggtggctccggttacgccctgcacgatgactattacggccttgacgtctggggccagggaaccctcgtgactgtgtccagcggtggaggaggttcgggcggaggaggatcaggagggggtggatcgcagagcgcactgactcagccggcatccgtgtccggtagccccggacagtcgattaccatctcctgtaccggcacctcctccgacgtgggagggtacaactacgtgtcgtggtaccagcagcacccaggaaaggcccctaagttgatgatctacgatgtgtcaaaccgcccgtctggagtctccaaccggttctccggctccaagtccggcaacaccgccagcctgaccattagcgggctgcaagccgaggatgaggccgactactactgctcgagctacacatcctcgagcaccctctacgtgttcggctcggggactaaggtcaccgtgctg

SEQ ID NO: 107 - protein, 472 aa, Artificial Sequence
  source: /note="Description of Artificial Sequence: Synthetic polypeptide"
QVQLQESGGGVVQPGRSLRLSCAASGFTFSSYGMHWVRQAPGKGLEWVAVISYDGSNKYYADSVKGRFTISRDNSKNTLYLQMNSLRAEDTAVYYCGGSGYALHDDYYGLDVWGQGTLVTVSSGGGGSGGGGSGGGGSQSALTQPASVSGSPGQSITISCTGTSSDVGGYNYVSWYQQHPGKAPKLMIYDVSNRPSGVSNRFSGSKSGNTASLTISGLQAEDEADYYCSSYTSSSTLYVFGSGTKVTVLTTTPAPRPPTPAPTIASQPLSLRPEACRPAAGGAVHTRGLDFACDIYIWAPLAGTCGVLLLSLVITLYCKRGRKKLLYIFKQPFMRPVQTTQEEDGCSCRFPEEEEGGCELRVKFSRSADAPAYQQGQNQLYNELNLGRREEYDVLDKRRGRDPEMGGKPRRKNPQEGLYNELQKDKMAEAYSEIGMKGERRRGKGHDGLYQGLSTATKDTYDALHMQALPPR

SEQ ID NO: 108 - DNA, 1416 bp, Artificial Sequence
  source: /note="Description of Artificial Sequence: Synthetic polynucleotide"
caagtgcagctgcaggaatccggtggcggagtcgtgcagcctggaaggagcctgagactctcatgcgccgcgtcagggttcaccttttcctcctacgggatgcattgggtcagacaggcccccggaaagggactcgaatgggtggctgtgatcagctacgacggctccaacaagtactacgccgactccgtgaaaggccggttcactatctcccgggacaactccaagaacacgctgtatctgcaaatgaattcactgcgcgcggaggataccgctgtgtactactgcggtggctccggttacgccctgcacgatgactattacggccttgacgtctggggccagggaaccctcgtgactgtgtccagcggtggaggaggttcgggcggaggaggatcaggagggggtggatcgcagagcgcactgactcagccggcatccgtgtccggtagccccggacagtcgattaccatctcctgtaccggcacctcctccgacgtgggagggtacaactacgtgtcgtggtaccagcagcacccaggaaaggcccctaagttgatgatctacgatgtgtcaaaccgcccgtctggagtctccaaccggttctccggctccaagtccggcaacaccgccagcctgaccattagcgggctgcaagccgaggatgaggccgactactactgctcgagctacacatcctcgagcaccctctacgtgttcggctcggggactaaggtcaccgtgctgaccactaccccagcaccgaggccacccaccccggctcctaccatcgcctcccagcctctgtccctgcgtccggaggcatgtagacccgcagctggtggggccgtgcatacccggggtcttgacttcgcctgcgatatctacatttgggcccctctggctggtacttgcggggtcctgctgctttcactcgtgatcactctttactgtaagcgcggtcggaagaagctgctgtacatctttaagcaacccttcatgaggcctgtgcagactactcaagaggaggacggctgttcatgccggttcccagaggaggaggaaggcggctgcgaactgcgcgtgaaattcagccgcagcgcagatgctccagcctaccagcaggggcagaaccagctctacaacgaactcaatcttggtcggagagaggagtacgacgtgctggacaagcggagaggacgggacccagaaatgggcgggaagccgcgcagaaagaatccccaagagggcctgtacaacgagctccaaaaggataagatggcagaagcctatagcgagattggtatgaaaggggaacgcagaagaggcaaaggccacgacggactgtaccagggactcagcaccgccaccaaggacacctatgacgctcttcacatgcaggccctgccgcctcgg

SEQ ID NO: 109 - protein, 17 aa, Artificial Sequence
  source: /note="Description of Artificial Sequence: Synthetic peptide"
VISYKGSNKYYADSVKG

SEQ ID NO: 110 - protein, 6 aa, Artificial Sequence
  source: /note="Description of Artificial Sequence: Synthetic peptide"
SYKGSN

SEQ ID NO: 111 - protein, 8 aa, Artificial Sequence
  source: /note="Description of Artificial Sequence: Synthetic peptide"
ISYKGSNK

SEQ ID NO: 112 - protein, 123 aa, Artificial Sequence
  source: /note="Description of Artificial Sequence: Synthetic polypeptide"
QVQLVESGGGVVQPGRSLRLSCAASGFTFSSYGMHWVRQAPGKGLEWVAVISYKGSNKYYADSVKGRFTISRDNSKNTLYLQMNSLRAEDTAVYYCGGSGYALHDDYYGLDVWGQGTLVTVSS

SEQ ID NO: 113 - DNA, 369 bp, Artificial Sequence
  source: /note="Description of Artificial Sequence: Synthetic polynucleotide"
caagtgcagcttgtcgaatcgggaggcggagtggtgcagcctggacgatcgctccggctctcatgtgccgcgagcggattcaccttctcgagctacggcatgcactgggtcagacaagccccaggaaagggcctggaatgggtggctgtcatctcgtacaagggctcaaacaagtactacgccgactccgtgaagggccggttcaccatctcccgcgataactccaagaataccctctatctgcaaatgaacagcctgagggccgaggatactgcagtgtactactgcgggggttcaggctacgcgctgcacgacgactactacggattggacgtctggggccaaggaactcttgtgaccgtgtcctct

SEQ ID NO: 114 - protein, 7 aa, Artificial Sequence
  source: /note="Description of Artificial Sequence: Synthetic peptide"
EVSNRLR

SEQ ID NO: 115 - protein, 11 aa, Artificial Sequence
  source: /note="Description of Artificial Sequence: Synthetic peptide"
SSYTSSSALYV

SEQ ID NO: 116 - protein, 3 aa, Artificial Sequence
  source: /note="Description of Artificial Sequence: Synthetic peptide"
EVS

SEQ ID NO: 117 - protein, 8 aa, Artificial Sequence
  source: /note="Description of Artificial Sequence: Synthetic peptide"
YTSSSALY

SEQ ID NO: 118 - protein, 111 aa, Artificial Sequence
  source: /note="Description of Artificial Sequence: Synthetic polypeptide"
QSALTQPASVSGSPGQSITISCTGTSSDVGGYNYVSWYQQHPGKAPKLMIYEVSNRLRGVSNRFSGSKSGNTASLTISGLQAEDEADYYCSSYTSSSALYVFGSGTKVTVL

SEQ ID NO: 119 - DNA, 333 bp, Artificial Sequence
  source: /note="Description of Artificial Sequence: Synthetic polynucleotide"
cagagcgcgctgactcagcctgcctccgtgagcggttcgccgggacagtccattaccatttcgtgcaccgggacctcctccgacgtgggaggctacaactacgtgtcctggtaccagcagcatcccggaaaggccccgaagctgatgatctacgaagtgtcgaacagactgcggggagtctccaaccgcttttccgggtccaagtccggcaacaccgccagcctgaccatcagcgggctccaggcagaagatgaggctgactattactgctcctcctacacgtcaagctccgccctctacgtgttcgggtccgggaccaaagtcactgtgctg

SEQ ID NO: 120 - protein, 254 aa, Artificial Sequence
  source: /note="Description of Artificial Sequence: Synthetic polypeptide"
QVQLVESGGGVVQPGRSLRLSCAASGFTFSSYGMHWVRQAPGKGLEWVAVISYKGSNKYYADSVKGRFTISRDNSKNTLYLQMNSLRAEDTAVYYCGGSGYALHDDYYGLDVWGQGTLVTVSSGGGGSGGGGSGGGGSGGGGSQSALTQPASVSGSPGQSITISCTGTSSDVGGYNYVSWYQQHPGKAPKLMIYEVSNRLRGVSNRFSGSKSGNTASLTISGLQAEDEADYYCSSYTSSSALYVFGSGTKVTVL

SEQ ID NO: 121 - DNA, 762 bp, Artificial Sequence
  source: /note="Description of Artificial Sequence: Synthetic polynucleotide"
caagtgcagcttgtcgaatcgggaggcggagtggtgcagcctggacgatcgctccggctctcatgtgccgcgagcggattcaccttctcgagctacggcatgcactgggtcagacaagccccaggaaagggcctggaatgggtggctgtcatctcgtacaagggctcaaacaagtactacgccgactccgtgaagggccggttcaccatctcccgcgataactccaagaataccctctatctgcaaatgaacagcctgagggccgaggatactgcagtgtactactgcgggggttcaggctacgcgctgcacgacgactactacggattggacgtctggggccaaggaactcttgtgaccgtgtcctctggtggaggcggatcagggggtggcggatctgggggtggtggttccgggggaggaggatcgcagagcgcgctgactcagcctgcctccgtgagcggttcgccgggacagtccattaccatttcgtgcaccgggacctcctccgacgtgggaggctacaactacgtgtcctggtaccagcagcatcccggaaaggccccgaagctgatgatctacgaagtgtcgaacagactgcggggagtctccaaccgcttttccgggtccaagtccggcaacaccgccagcctgaccatcagcgggctccaggcagaagatgaggctgactattactgctcctcctacacgtcaagctccgccctctacgtgttcgggtccgggaccaaagtcactgtgctg

SEQ ID NO: 122 - protein, 477 aa, Artificial Sequence
  source: /note="Description of Artificial Sequence: Synthetic polypeptide"
QVQLVESGGGVVQPGRSLRLSCAASGFTFSSYGMHWVRQAPGKGLEWVAVISYKGSNKYYADSVKGRFTISRDNSKNTLYLQMNSLRAEDTAVYYCGGSGYALHDDYYGLDVWGQGTLVTVSSGGGGSGGGGSGGGGSGGGGSQSALTQPASVSGSPGQSITISCTGTSSDVGGYNYVSWYQQHPGKAPKLMIYEVSNRLRGVSNRFSGSKSGNTASLTISGLQAEDEADYYCSSYTSSSALYVFGSGTKVTVLTTTPAPRPPTPAPTIASQPLSLRPEACRPAAGGAVHTRGLDFACDIYIWAPLAGTCGVLLLSLVITLYCKRGRKKLLYIFKQPFMRPVQTTQEEDGCSCRFPEEEEGGCELRVKFSRSADAPAYQQGQNQLYNELNLGRREEYDVLDKRRGRDPEMGGKPRRKNPQEGLYNELQKDKMAEAYSEIGMKGERRRGKGHDGLYQGLSTATKDTYDALHMQALPPR

SEQ ID NO: 123 - DNA, 1431 bp, Artificial Sequence
  source: /note="Description of Artificial Sequence: Synthetic polynucleotide"
caagtgcagcttgtcgaatcgggaggcggagtggtgcagcctggacgatcgctccggctctcatgtgccgcgagcggattcaccttctcgagctacggcatgcactgggtcagacaagccccaggaaagggcctggaatgggtggctgtcatctcgtacaagggctcaaacaagtactacgccgactccgtgaagggccggttcaccatctcccgcgataactccaagaataccctctatctgcaaatgaacagcctgagggccgaggatactgcagtgtactactgcgggggttcaggctacgcgctgcacgacgactactacggattggacgtctggggccaaggaactcttgtgaccgtgtcctctggtggaggcggatcagggggtggcggatctgggggtggtggttccgggggaggaggatcgcagagcgcgctgactcagcctgcctccgtgagcggttcgccgggacagtccattaccatttcgtgcaccgggacctcctccgacgtgggaggctacaactacgtgtcctggtaccagcagcatcccggaaaggccccgaagctgatgatctacgaagtgtcgaacagactgcggggagtctccaaccgcttttccgggtccaagtccggcaacaccgccagcctgaccatcagcgggctccaggcagaagatgaggctgactattactgctcctcctacacgtcaagctccgccctctacgtgttcgggtccgggaccaaagtcactgtgctgaccactaccccagcaccgaggccacccaccccggctcctaccatcgcctcccagcctctgtccctgcgtccggaggcatgtagacccgcagctggtggggccgtgcatacccggggtcttgacttcgcctgcgatatctacatttgggcccctctggctggtacttgcggggtcctgctgctttcactcgtgatcactctttactgtaagcgcggtcggaagaagctgctgtacatctttaagcaacccttcatgaggcctgtgcagactactcaagaggaggacggctgttcatgccggttcccagaggaggaggaaggcggctgcgaactgcgcgtgaaattcagccgcagcgcagatgctccagcctaccagcaggggcagaaccagctctacaacgaactcaatcttggtcggagagaggagtacgacgtgctggacaagcggagaggacgggacccagaaatgggcgggaagccgcgcagaaagaatccccaagagggcctgtacaacgagctccaaaaggataagatggcagaagcctatagcgagattggtatgaaaggggaacgcagaagaggcaaaggccacgacggactgtaccagggactcagcaccgccaccaaggacacctatgacgctcttcacatgcaggccctgccgcctcgg

SEQ ID NO: 124 - protein, 111 aa, Artificial Sequence
  source: /note="Description of Artificial Sequence: Synthetic polypeptide"
QSALTQPASVSGSPGQSITISCTGTSSDVGGYNYVSWYQQHPGKAPKLMIYEVSNRLRGVSNRFSGSKSGNTASLTISGLQAEDEADYYCSSYTSSSTLYVFGSGTKVTVL

SEQ ID NO: 125 - DNA, 333 bp, Artificial Sequence
  source: /note="Description of Artificial Sequence: Synthetic polynucleotide"
cagagcgcgctgactcagcctgcctccgtgagcggttcgccgggacagtccattaccatttcgtgcaccgggacctcctccgacgtgggaggctacaactacgtgtcctggtaccagcagcatcccggaaaggccccgaagctgatgatctacgaagtgtcgaacagactgcggggagtctccaaccgcttttccgggtccaagtccggcaacaccgccagcctgaccatcagcgggctccaggcagaagatgaggctgactattactgctcctcctacacgtcaagctccaccctctacgtgttcgggtccgggaccaaagtcactgtgctg

SEQ ID NO: 126 - protein, 254 aa, Artificial Sequence
  source: /note="Description of Artificial Sequence: Synthetic polypeptide"
QVQLVESGGGVVQPGRSLRLSCAASGFTFSSYGMHWVRQAPGKGLEWVAVISYKGSNKYYADSVKGRFTISRDNSKNTLYLQMNSLRAEDTAVYYCGGSGYALHDDYYGLDVWGQGTLVTVSSGGGGSGGGGSGGGGSGGGGSQSALTQPASVSGSPGQSITISCTGTSSDVGGYNYVSWYQQHPGKAPKLMIYEVSNRLRGVSNRFSGSKSGNTASLTISGLQAEDEADYYCSSYTSSSTLYVFGSGTKVTVL

SEQ ID NO: 127 - DNA, 762 bp, Artificial Sequence
  source: /note="Description of Artificial Sequence: Synthetic polynucleotide"
caagtgcagcttgtcgaatcgggaggcggagtggtgcagcctggacgatcgctccggctctcatgtgccgcgagcggattcaccttctcgagctacggcatgcactgggtcagacaagccccaggaaagggcctggaatgggtggctgtcatctcgtacaagggctcaaacaagtactacgccgactccgtgaagggccggttcaccatctcccgcgataactccaagaataccctctatctgcaaatgaacagcctgagggccgaggatactgcagtgtactactgcgggggttcaggctacgcgctgcacgacgactactacggattggacgtctggggccaaggaactcttgtgaccgtgtcctctggtggaggcggatcagggggtggcggatctgggggtggtggttccgggggaggaggatcgcagagcgcgctgactcagcctgcctccgtgagcggttcgccgggacagtccattaccatttcgtgcaccgggacctcctccgacgtgggaggctacaactacgtgtcctggtaccagcagcatcccggaaaggccccgaagctgatgatctacgaagtgtcgaacagactgcggggagtctccaaccgcttttccgggtccaagtccggcaacaccgccagcctgaccatcagcgggctccaggcagaagatgaggctgactattactgctcctcctacacgtcaagctccaccctctacgtgttcgggtccgggaccaaagtcactgtgctg

SEQ ID NO: 128 - protein, 477 aa, Artificial Sequence
  source: /note="Description of Artificial Sequence: Synthetic polypeptide"
QVQLVESGGGVVQPGRSLRLSCAASGFTFSSYGMHWVRQAPGKGLEWVAVISYKGSNKYYADSVKGRFTISRDNSKNTLYLQMNSLRAEDTAVYYCGGSGYALHDDYYGLDVWGQGTLVTVSSGGGGSGGGGSGGGGSGGGGSQSALTQPASVSGSPGQSITISCTGTSSDVGGYNYVSWYQQHPGKAPKLMIYEVSNRLRGVSNRFSGSKSGNTASLTISGLQAEDEADYYCSSYTSSSTLYVFGSGTKVTVLTTTPAPRPPTPAPTIASQPLSLRPEACRPAAGGAVHTRGLDFACDIYIWAPLAGTCGVLLLSLVITLYCKRGRKKLLYIFKQPFMRPVQTTQEEDGCSCRFPEEEEGGCELRVKFSRSADAPAYQQGQNQLYNELNLGRREEYDVLDKRRGRDPEMGGKPRRKNPQEGLYNELQKDKMAEAYSEIGMKGERRRGKGHDGLYQGLSTATKDTYDALHMQALPPR

SEQ ID NO: 129 - DNA, 1431 bp, Artificial Sequence
  source: /note="Description of Artificial Sequence: Synthetic polynucleotide"
caagtgcagcttgtcgaatcgggaggcggagtggtgcagcctggacgatcgctccggctctcatgtgccgcgagcggattcaccttctcgagctacggcatgcactgggtcagacaagccccaggaaagggcctggaatgggtggctgtcatctcgtacaagggctcaaacaagtactacgccgactccgtgaagggccggttcaccatctcccgcgataactccaagaataccctctatctgcaaatgaacagcctgagggccgaggatactgcagtgtactactgcgggggttcaggctacgcgctgcacgacgactactacggattggacgtctggggccaaggaactcttgtgaccgtgtcctctggtggaggcggatcagggggtggcggatctgggggtggtggttccgggggaggaggatcgcagagcgcgctgactcagcctgcctccgtgagcggttcgccgggacagtccattaccatttcgtgcaccgggacctcctccgacgtgggaggctacaactacgtgtcctggtaccagcagcatcccggaaaggccccgaagctgatgatctacgaagtgtcgaacagactgcggggagtctccaaccgcttttccgggtccaagtccggcaacaccgccagcctgaccatcagcgggctccaggcagaagatgaggctgactattactgctcctcctacacgtcaagctccaccctctacgtgttcgggtccgggaccaaagtcactgtgctgaccactaccccagcaccgaggccacccaccccggctcctaccatcgcctcccagcctctgtccctgcgtccggaggcatgtagacccgcagctggtggggccgtgcatacccggggtcttgacttcgcctgcgatatctacatttgggcccctctggctggtacttgcggggtcctgctgctttcactcgtgatcactctttactgtaagcgcggtcggaagaagctgctgtacatctttaagcaacccttcatgaggcctgtgcagactactcaagaggaggacggctgttcatgccggttcccagaggaggaggaaggcggctgcgaactgcgcgtgaaattcagccgcagcgcagatgctccagcctaccagcaggggcagaaccagctctacaacgaactcaatcttggtcggagagaggagtacgacgtgctggacaagcggagaggacgggacccagaaatgggcgggaagccgcgcagaaagaatccccaagagggcctgtacaacgagctccaaaaggataagatggcagaagcctatagcgagattggtatgaaaggggaacgcagaagaggcaaaggccacgacggactgtaccagggactcagcaccgccaccaaggacacctatgacgctcttcacatgcaggccctgccgcctcgg

SEQ ID NO: 130 - protein, 17 aa, Artificial Sequence
  source: /note="Description of Artificial Sequence: Synthetic peptide"
  VARIANT (5)..(5): /replace="Lys"
  SITE (1)..(17): /note="Variant residues given in the sequence have no preference with respect to those in the annotations for variant positions"
VISYDGSNKYYADSVKG

SEQ ID NO: 131 - protein, 7 aa, Artificial Sequence
  source: /note="Description of Artificial Sequence: Synthetic peptide"
  VARIANT (1)..(1): /replace="Glu"
  VARIANT (6)..(6): /replace="Leu"
  VARIANT (7)..(7): /replace="Arg"
  SITE (1)..(7): /note="Variant residues given in the sequence have no preference with respect to those in the annotations for variant positions"
DVSNRPS

SEQ ID NO: 132 - protein, 11 aa, Artificial Sequence
  source: /note="Description of Artificial Sequence: Synthetic peptide"
  VARIANT (8)..(8): /replace="Ala"
  SITE (1)..(11): /note="Variant residues given in the sequence have no preference with respect to those in the annotations for variant positions"
SSYTSSSTLYV

SEQ ID NO: 133 - protein, 6 aa, Artificial Sequence
  source: /note="Description of Artificial Sequence: Synthetic peptide"
  VARIANT (3)..(3): /replace="Lys"
  SITE (1)..(6): /note="Variant residues given in the sequence have no preference with respect to those in the annotations for variant positions"
SYDGSN

SEQ ID NO: 134 - protein, 3 aa, Artificial Sequence
  source: /note="Description of Artificial Sequence: Synthetic peptide"
  VARIANT (1)..(1): /replace="Glu"
  SITE (1)..(3): /note="Variant residues given in the sequence have no preference with respect to those in the annotations for variant positions"
DVS

SEQ ID NO: 135 - protein, 8 aa, Artificial Sequence
  source: /note="Description of Artificial Sequence: Synthetic peptide"
  VARIANT (6)..(6): /replace="Ala"
  SITE (1)..(8): /note="Variant residues given in the sequence have no preference with respect to those in the annotations for variant positions"
YTSSSTLY

SEQ ID NO: 136 - protein, 8 aa, Artificial Sequence
  source: /note="Description of Artificial Sequence: Synthetic peptide"
  VARIANT (4)..(4): /replace="Lys"
  SITE (1)..(8): /note="Variant residues given in the sequence have no preference with respect to those in the annotations for variant positions"
ISYDGSNK

SEQ ID NO: 137 - protein, 5 aa, Artificial Sequence
  source: /note="Description of Artificial Sequence: Synthetic peptide"
GFWMS

SEQ ID NO: 138 - protein, 17 aa, Artificial Sequence
  source: /note="Description of Artificial Sequence: Synthetic peptide"
NIKQDGSEKYYVDSVRG

SEQ ID NO: 139 - protein, 9 aa, Artificial Sequence
  source: /note="Description of Artificial Sequence: Synthetic peptide"
ALDYYGMDV

SEQ ID NO: 140 - protein, 7 aa, Artificial Sequence
  source: /note="Description of Artificial Sequence: Synthetic peptide"
GFTFSGF

SEQ ID NO: 141 - protein, 6 aa, Artificial Sequence
  source: /note="Description of Artificial Sequence: Synthetic peptide"
KQDGSE

SEQ ID NO: 142 - protein, 8 aa, Artificial Sequence
  source: /note="Description of Artificial Sequence: Synthetic peptide"
GFTFSGFW

SEQ ID NO: 143 - protein, 8 aa, Artificial Sequence
  source: /note="Description of Artificial Sequence: Synthetic peptide"
IKQDGSEK

SEQ ID NO: 144 - protein, 11 aa, Artificial Sequence
  source: /note="Description of Artificial Sequence: Synthetic peptide"
ARALDYYGMDV

SEQ ID NO: 145 - protein, 118 aa, Artificial Sequence
  source: /note="Description of Artificial Sequence: Synthetic polypeptide"
EVQLVESGGGLVQPGGSLRLSCAASGFTFSGFWMSWVRQAPGKGLEWVANIKQDGSEKYYVDSVRGRFTISRDNAKNSLYLQMNSLRAEDTAVYYCARALDYYGMDVWGQGTTVTVSS

SEQ ID NO: 146 - DNA, 354 bp, Artificial Sequence
  source: /note="Description of Artificial Sequence: Synthetic polynucleotide"
gaagtgcaactggtggagagcggtggagggcttgtccagcccggaggatcgctgcggctgtcctgtgctgcgtccgggttcaccttctccggcttctggatgtcctgggtcagacaggcaccgggaaagggcctcgaatgggtggccaacatcaagcaggatggctccgagaagtactacgtcgactccgtgagaggccgcttcaccatctcccgggacaacgccaagaactcgctgtacctccaaatgaatagcctcagggcggaagatactgctgtgtattactgcgcacgcgcccttgactactacggcatggacgtctggggccaagggaccactgtgaccgtgtctagc

SEQ ID NO: 147 - protein, 17 aa, Artificial Sequence
  source: /note="Description of Artificial Sequence: Synthetic peptide"
RSSQSLLDSDDGNTYLD

SEQ ID NO: 148 - protein, 7 aa, Artificial Sequence
  source: /note="Description of Artificial Sequence: Synthetic peptide"
TLSYRAS

SEQ ID NO: 149 - protein, 10 aa, Artificial Sequence
  source: /note="Description of Artificial Sequence: Synthetic peptide"
TQRLEFPSIT

SEQ ID NO: 150 - protein, 13 aa, Artificial Sequence
  source: /note="Description of Artificial Sequence: Synthetic peptide"
SQSLLDSDDGNTY

SEQ ID NO: 151 - protein, 3 aa, Artificial Sequence
  source: /note="Description of Artificial Sequence: Synthetic peptide"
TLS

SEQ ID NO: 152 - protein, 7 aa, Artificial Sequence
  source: /note="Description of Artificial Sequence: Synthetic peptide"
RLEFPSI

SEQ ID NO: 153 - protein, 12 aa, Artificial Sequence
  source: /note="Description of Artificial Sequence: Synthetic peptide"
QSLLDSDDGNTY

SEQ ID NO: 154 - protein, 114 aa, Artificial Sequence
  source: /note="Description of Artificial Sequence: Synthetic polypeptide"
DIVMTQTPLSLPVTPGEPASISCRSSQSLLDSDDGNTYLDWYLQKPGQSPRLLIYTLSYRASGVPDRFSGSGSGTDFTLKISRVEAEDVGLYYCTQRLEFPSITFGQGTRLEIK

SEQ ID NO: 155 - DNA, 342 bp, Artificial Sequence
  source: /note="Description of Artificial Sequence: Synthetic polynucleotide"
gatatcgtgatgacccagactcccctgtccctgcctgtgactcccggagaaccagcctccatttcctgccggtcctcccagtccctgctggacagcgacgacggcaacacttacctggactggtacttgcagaagccgggccaatcgcctcgcctgctgatctataccctgtcataccgggcctcaggagtgcctgaccgcttctcgggatcagggagcgggaccgatttcaccctgaaaatttcccgagtggaagccgaggacgtcggactgtactactgcacccagcgcctcgaattcccgtcgattacgtttggacagggtacccggcttgagatcaag

SEQ ID NO: 156 - protein, 252 aa, Artificial Sequence
  source: /note="Description of Artificial Sequence: Synthetic polypeptide"
EVQLVESGGGLVQPGGSLRLSCAASGFTFSGFWMSWVRQAPGKGLEWVANIKQDGSEKYYVDSVRGRFTISRDNAKNSLYLQMNSLRAEDTAVYYCARALDYYGMDVWGQGTTVTVSSGGGGSGGGGSGGGGSGGGGSDIVMTQTPLSLPVTPGEPASISCRSSQSLLDSDDGNTYLDWYLQKPGQSPRLLIYTLSYRASGVPDRFSGSGSGTDFTLKISRVEAEDVGLYYCTQRLEFPSITFGQGTRLEIK

SEQ ID NO: 157 - DNA, 756 bp, Artificial Sequence
  source: /note="Description of Artificial Sequence: Synthetic polynucleotide"
gaagtgcaactggtggagagcggtggagggcttgtccagcccggaggatcgctgcggctgtcctgtgctgcgtccgggttcaccttctccggcttctggatgtcctgggtcagacaggcaccgggaaagggcctcgaatgggtggccaacatcaagcaggatggctccgagaagtactacgtcgactccgtgagaggccgcttcaccatctcccgggacaacgccaagaactcgctgtacctccaaatgaatagcctcagggcggaagatactgctgtgtattactgcgcacgcgcccttgactactacggcatggacgtctggggccaagggaccactgtgaccgtgtctagcggaggcggaggttcagggggcggtggatcaggcggaggaggatcggggggtggtggatcggatatcgtgatgacccagactcccctgtccctgcctgtgactcccggagaaccagcctccatttcctgccggtcctcccagtccctgctggacagcgacgacggcaacacttacctggactggtacttgcagaagccgggccaatcgcctcgcctgctgatctataccctgtcataccgggcctcaggagtgcctgaccgcttctcgggatcagggagcgggaccgatttcaccctgaaaatttcccgagtggaagccgaggacgtcggactgtactactgcacccagcgcctcgaattcccgtcgattacgtttggacagggtacccggcttgagatcaag

SEQ ID NO: 158 - protein, 475 aa, Artificial Sequence
  source: /note="Description of Artificial Sequence: Synthetic polypeptide"
EVQLVESGGGLVQPGGSLRLSCAASGFTFSGFWMSWVRQAPGKGLEWVANIKQDGSEKYYVDSVRGRFTISRDNAKNSLYLQMNSLRAEDTAVYYCARALDYYGMDVWGQGTTVTVSSGGGGSGGGGSGGGGSGGGGSDIVMTQTPLSLPVTPGEPASISCRSSQSLLDSDDGNTYLDWYLQKPGQSPRLLIYTLSYRASGVPDRFSGSGSGTDFTLKISRVEAEDVGLYYCTQRLEFPSITFGQGTRLEIKTTTPAPRPPTPAPTIASQPLSLRPEACRPAAGGAVHTRGLDFACDIYIWAPLAGTCGVLLLSLVITLYCKRGRKKLLYIFKQPFMRPVQTTQEEDGCSCRFPEEEEGGCELRVKFSRSADAPAYQQGQNQLYNELNLGRREEYDVLDKRRGRDPEMGGKPRRKNPQEGLYNELQKDKMAEAYSEIGMKGERRRGKGHDGLYQGLSTATKDTYDALHMQALPPR

SEQ ID NO: 159 - DNA, 1425 bp, Artificial Sequence
  source: /note="Description of Artificial Sequence: Synthetic polynucleotide"
gaagtgcaactggtggagagcggtggagggcttgtccagcccggaggatcgctgcggctgtcctgtgctgcgtccgggttcaccttctccggcttctggatgtcctgggtcagacaggcaccgggaaagggcctcgaatgggtggccaacatcaagcaggatggctccgagaagtactacgtcgactccgtgagaggccgcttcaccatctcccgggacaacgccaagaactcgctgtacctccaaatgaatagcctcagggcggaagatactgctgtgtattactgcgcacgcgcccttgactactacggcatggacgtctggggccaagggaccactgtgaccgtgtctagcggaggcggaggttcagggggcggtggatcaggcggaggaggatcggggggtggtggatcggatatcgtgatgacccagactcccctgtccctgcctgtgactcccggagaaccagcctccatttcctgccggtcctcccagtccctgctggacagcgacgacggcaacacttacctggactggtacttgcagaagccgggccaatcgcctcgcctgctgatctataccctgtcataccgggcctcaggagtgcctgaccgcttctcgggatcagggagcgggaccgatttcaccctgaaaatttcccgagtggaagccgaggacgtcggactgtactactgcacccagcgcctcgaattcccgtcgattacgtttggacagggtacccggcttgagatcaagaccactaccccagcaccgaggccacccaccccggctcctaccatcgcctcccagcctctgtccctgcgtccggaggcatgtagacccgcagctggtggggccgtgcatacccggggtcttgacttcgcctgcgatatctacatttgggcccctctggctggtacttgcggggtcctgctgctttcactcgtgatcactctttactgtaagcgcggtcggaagaagctgctgtacatctttaagcaacccttcatgaggcctgtgcagactactcaagaggaggacggctgttcatgccggttcccagaggaggaggaaggcggctgcgaactgcgcgtgaaattcagccgcagcgcagatgctccagcctaccagcaggggcagaaccagctctacaacgaactcaatcttggtcggagagaggagtacgacgtgctggacaagcggagaggacgggacccagaaatgggcgggaagccgcgcagaaagaatccccaagagggcctgtacaacgagctccaaaaggataagatggcagaagcctatagcgagattggtatgaaaggggaacgcagaagaggcaaaggccacgacggactgtaccagggactcagcaccgccaccaaggacacctatgacgctcttcacatgcaggccctgccgcctcgg

SEQ ID NO: 160 - protein, 5 aa, Artificial Sequence
  source: /note="Description of Artificial Sequence: Synthetic peptide"
SFRMN

SEQ ID NO: 161 - protein, 17 aa, Artificial Sequence
  source: /note="Description of Artificial Sequence: Synthetic peptide"
SISSSSSYIYYADSVKG

SEQ ID NO: 162 - protein, 9 aa, Artificial Sequence
  source: /note="Description of Artificial Sequence: Synthetic peptide"
WLSYYGMDV

SEQ ID NO: 163 - protein, 7 aa, Artificial Sequence
  source: /note="Description of Artificial Sequence: Synthetic peptide"
GFTFSSF

SEQ ID NO: 164 - protein, 6 aa, Artificial Sequence
  source: /note="Description of Artificial Sequence: Synthetic peptide"
SSSSSY

SEQ ID NO: 165 - protein, 8 aa, Artificial Sequence
  source: /note="Description of Artificial Sequence: Synthetic peptide"
GFTFSSFR

SEQ ID NO: 166 - protein, 8 aa, Artificial Sequence
  source: /note="Description of Artificial Sequence: Synthetic peptide"
ISSSSSYI

SEQ ID NO: 167 - protein, 11 aa, Artificial Sequence
  source: /note="Description of Artificial Sequence: Synthetic peptide"
ARWLSYYGMDV

SEQ ID NO: 168 - protein, 118 aa, Artificial Sequence
  source: /note="Description of Artificial Sequence: Synthetic polypeptide"
EVQLVESGGGLVKPGGSLRLSCAASGFTFSSFRMNWVRQAPGKGLEWVSSISSSSSYIYYADSVKGRFTISRDNAKNSLYLQMNSLRAEDTAVYYCARWLSYYGMDVWGQGTTVTVSS

SEQ ID NO: 169 - DNA, 354 bp, Artificial Sequence
  source: /note="Description of Artificial Sequence: Synthetic polynucleotide"
gaagtgcaactggtggagagcggtggagggcttgtcaagcccggaggatcgctgcggctgtcctgtgctgcgtccgggttcaccttctcctcgttccgcatgaactgggtcagacaggcaccgggaaagggcctcgaatgggtgtcctcaatctcatcgtcctcgtcctacatctactacgccgactccgtgaaaggccgcttcaccatctcccgggacaacgccaagaactcgctgtacctccaaatgaatagcctcagggcggaagatactgctgtgtattactgcgcacgctggctttcctactacggcatggacgtctggggccaagggaccactgtgaccgtgtctagc

SEQ ID NO: 170 - protein, 7 aa, Artificial Sequence
  source: /note="Description of Artificial Sequence: Synthetic peptide"
TLSFRAS

SEQ ID NO: 171 - protein, 9 aa, Artificial Sequence
  source: /note="Description of Artificial Sequence: Synthetic peptide"
MQRIGFPIT

SEQ ID NO: 172 - protein, 6 aa, Artificial Sequence
  source: /note="Description of Artificial Sequence: Synthetic peptide"
RIGFPI

SEQ ID NO: 173 - protein, 113 aa, Artificial Sequence
  source: /note="Description of Artificial Sequence: Synthetic polypeptide"
DIVMTQTPLSLPVTPGEPASISCRSSQSLLDSDDGNTYLDWYLQKPGQSPQLLIYTLSFRASGVPDRFSGSGSGTDFTLKIRRVEAEDVGVYYCMQRIGFPITFGQGTRLEIK

SEQ ID NO: 174 - DNA, 339 bp, Artificial Sequence
  source: /note="Description of Artificial Sequence: Synthetic polynucleotide"
gatatcgtgatgacccagactcccctgtccctgcctgtgactcccggagaaccagcctccatttcctgccggtcctcccagtccctgctggacagcgacgacggcaacacttacctggactggtacttgcagaagccgggccaatcgcctcagctgctgatctataccctgtcattccgggcctcaggagtgcctgaccgcttctcgggatcagggagcgggaccgatttcaccctgaaaattaggcgagtggaagccgaggacgtcggagtgtactactgcatgcagcgcatcggcttcccgattacgtttggacagggtacccggcttgagatcaag

SEQ ID NO: 175 - protein, 251 aa, Artificial Sequence
  source: /note="Description of Artificial Sequence: Synthetic polypeptide"
EVQLVESGGGLVKPGGSLRLSCAASGFTFSSFRMNWVRQAPGKGLEWVSSISSSSSYIYYADSVKGRFTISRDNAKNSLYLQMNSLRAEDTAVYYCARWLSYYGMDVWGQGTTVTVSSGGGGSGGGGSGGGGSGGGGSDIVMTQTPLSLPVTPGEPASISCRSSQSLLDSDDGNTYLDWYLQKPGQSPQLLIYTLSFRASGVPDRFSGSGSGTDFTLKIRRVEAEDVGVYYCMQRIGFPITFGQGTRLEIK

SEQ ID NO: 176 - DNA, 753 bp, Artificial Sequence
  source: /note="Description of Artificial Sequence: Synthetic polynucleotide"
gaagtgcaactggtggagagcggtggagggcttgtcaagcccggaggatcgctgcggctgtcctgtgctgcgtccgggttcaccttctcctcgttccgcatgaactgggtcagacaggcaccgggaaagggcctcgaatgggtgtcctcaatctcatcgtcctcgtcctacatctactacgccgactccgtgaaaggccgcttcaccatctcccgggacaacgccaagaactcgctgtacctccaaatgaatagcctcagggcggaagatactgctgtgtattactgcgcacgctggctttcctactacggcatggacgtctggggccaagggaccactgtgaccgtgtctagcggaggcggaggttcagggggcggtggatcaggcggaggaggatcggggggtggtggatcggatatcgtgatgacccagactcccctgtccctgcctgtgactcccggagaaccagcctccatttcctgccggtcctcccagtccctgctggacagcgacgacggcaacacttacctggactggtacttgcagaagccgggccaatcgcctcagctgctgatctataccctgtcattccgggcctcaggagtgcctgaccgcttctcgggatcagggagcgggaccgatttcaccctgaaaattaggcgagtggaagccgaggacgtcggagtgtactactgcatgcagcgcatcggcttcccgattacgtttggacagggtacccggcttgagatcaag

SEQ ID NO: 177 - protein, 474 aa, Artificial Sequence
  source: /note="Description of Artificial Sequence: Synthetic polypeptide"
EVQLVESGGGLVKPGGSLRLSCAASGFTFSSFRMNWVRQAPGKGLEWVSSISSSSSYIYYADSVKGRFTISRDNAKNSLYLQMNSLRAEDTAVYYCARWLSYYGMDVWGQGTTVTVSSGGGGSGGGGSGGGGSGGGGSDIVMTQTPLSLPVTPGEPASISCRSSQSLLDSDDGNTYLDWYLQKPGQSPQLLIYTLSFRASGVPDRFSGSGSGTDFTLKIRRVEAEDVGVYYCMQRIGFPITFGQGTRLEIKTTTPAPRPPTPAPTIASQPLSLRPEACRPAAGGAVHTRGLDFACDIYIWAPLAGTCGVLLLSLVITLYCKRGRKKLLYIFKQPFMRPVQTTQEEDGCSCRFPEEEEGGCELRVKFSRSADAPAYQQGQNQLYNELNLGRREEYDVLDKRRGRDPEMGGKPRRKNPQEGLYNELQKDKMAEAYSEIGMKGERRRGKGHDGLYQGLSTATKDTYDALHMQALPPR

SEQ ID NO: 178 - DNA, 1422 bp, Artificial Sequence
  source: /note="Description of Artificial Sequence: Synthetic polynucleotide"
gaagtgcaactggtggagagcggtggagggcttgtcaagcccggaggatcgctgcggctgtcctgtgctgcgtccgggttcaccttctcctcgttccgcatgaactgggtcagacaggcaccgggaaagggcctcgaatgggtgtcctcaatctcatcgtcctcgtcctacatctactacgccgactccgtgaaaggccgcttcaccatctcccgggacaacgccaagaactcgctgtacctccaaatgaatagcctcagggcggaagatactgctgtgtattactgcgcacgctggctttcctactacggcatggacgtctggggccaagggaccactgtgaccgtgtctagcggaggcggaggttcagggggcggtggatcaggcggaggaggatcggggggtggtggatcggatatcgtgatgacccagactcccctgtccctgcctgtgactcccggagaaccagcctccatttcctgccggtcctcccagtccctgctggacagcgacgacggcaacacttacctggactggtacttgcagaagccgggccaatcgcctcagctgctgatctataccctgtcattccgggcctcaggagtgcctgaccgcttctcgggatcagggagcgggaccgatttcaccctgaaaattaggcgagtggaagccgaggacgtcggagtgtactactgcatgcagcgcatcggcttcccgattacgtttggacagggtacccggcttgagatcaagaccactaccccagcaccgaggccacccaccccggctcctaccatcgcctcccagcctctgtccctgcgtccggaggcatgtagacccgcagctggtggggccgtgcatacccggggtcttgacttcgcctgcgatatctacatttgggcccctctggctggtacttgcggggtcctgctgctttcactcgtgatcactctttactgtaagcgcggtcggaagaagctgctgtacatctttaagcaacccttcatgaggcctgtgcagactactcaagaggaggacggctgttcatgccggttcccagaggaggaggaaggcggctgcgaactgcgcgtgaaattcagccgcagcgcagatgctccagcctaccagcaggggcagaaccagctctacaacgaactcaatcttggtcggagagaggagtacgacgtgctggacaagcggagaggacgggacccagaaatgggcgggaagccgcgcagaaagaatccccaagagggcctgtacaacgagctccaaaaggataagatggcagaagcctatagcgagattggtatgaaaggggaacgcagaagaggcaaaggccacgacggactgtaccagggactcagcaccgccaccaaggacacctatgacgctcttcacatgcaggccctgccgcctcgg

SEQ ID NO: 179 - protein, 5 aa, Artificial Sequence
  source: /note="Description of Artificial Sequence: Synthetic peptide"
  VARIANT (1)..(1): /replace="Ser"
  VARIANT (3)..(3): /replace="Arg"
  VARIANT (5)..(5): /replace="Asn"
  SITE (1)..(5): /note="Variant residues given in the sequence have no preference with respect to those in the annotations for variant positions"
GFWMS

SEQ ID NO: 180 - protein, 17 aa, Artificial Sequence
  source: /note="Description of Artificial Sequence: Synthetic peptide"
  VARIANT (1)..(1): /replace="Ser"
  VARIANT (3)..(3): /replace="Ser"
  VARIANT (4)..(4): /replace="Ser"
  VARIANT (5)..(5): /replace="Ser"
  VARIANT (6)..(6): /replace="Ser"
  VARIANT (8)..(8): /replace="Tyr"
  VARIANT (9)..(9): /replace="Ile"
  VARIANT (12)..(12): /replace="Ala"
  VARIANT (16)..(16): /replace="Lys"
  SITE (1)..(17): /note="Variant residues given in the sequence have no preference with respect to those in the annotations for variant positions"
NIKQDGSEKYYVDSVRG

SEQ ID NO: 181 - protein, 9 aa, Artificial Sequence
  source: /note="Description of Artificial Sequence: Synthetic peptide"
  VARIANT (1)..(1): /replace="Trp"
  VARIANT (3)..(3): /replace="Ser"
  SITE (1)..(9): /note="Variant residues given in the sequence have no preference with respect to those in the annotations for variant positions"
ALDYYGMDV

SEQ ID NO: 182 - protein, 7 aa, Artificial Sequence
  source: /note="Description of Artificial Sequence: Synthetic peptide"
  VARIANT (4)..(4): /replace="Phe"
  SITE (1)..(7): /note="Variant residues given in the sequence have no preference with respect to those in the annotations for variant positions"
TLSYRAS

SEQ ID NO: 183 - protein, 10 aa, Artificial Sequence
  source: /note="Description of Artificial Sequence: Synthetic peptide"
  VARIANT (1)..(1): /replace="Met"
  VARIANT (4)..(4): /replace="Ile"
  VARIANT (5)..(5): /replace="Gly"
  VARIANT (8)..(8): /replace=" "
  SITE (1)..(10): /note="Variant residues given in the sequence have no preference with respect to those in the annotations for variant positions"
TQRLEFPSIT

SEQ ID NO: 184 - protein, 7 aa, Artificial Sequence
  source: /note="Description of Artificial Sequence: Synthetic peptide"
  VARIANT (6)..(6): /replace="Ser"
  SITE (1)..(7): /note="Variant residues given in the sequence have no preference with respect to those in the annotations for variant positions"
GFTFSGF

SEQ ID NO: 185 - protein, 6 aa, Artificial Sequence
  source: /note="Description of Artificial Sequence: Synthetic peptide"
  VARIANT (1)..(1): /replace="Ser"
  VARIANT (2)..(2): /replace="Ser"
  VARIANT (3)..(3): /replace="Ser"
  VARIANT (4)..(4): /replace="Ser"
  VARIANT (6)..(6): /replace="Tyr"
  SITE (1)..(6): /note="Variant residues given in the sequence have no preference with respect to those in the annotations for variant positions"
KQDGSE

SEQ ID NO: 186 - protein, 7 aa, Artificial Sequence
  source: /note="Description of Artificial Sequence: Synthetic peptide"
  VARIANT (2)..(2): /replace="Ile"
  VARIANT (3)..(3): /replace="Gly"
  VARIANT (6)..(6): /replace=" "
  SITE (1)..(7): /note="Variant residues given in the sequence have no preference with respect to those in the annotations for variant positions"
RLEFPSI

SEQ ID NO: 187 - protein, 8 aa, Artificial Sequence
  source: /note="Description of Artificial Sequence: Synthetic peptide"
  VARIANT (6)..(6): /replace="Ser"
  VARIANT (8)..(8): /replace="Arg"
  SITE (1)..(8): /note="Variant residues given in the sequence have no preference with respect to those in the annotations for variant positions"
GFTFSGFW

SEQ ID NO: 188 - protein, 8 aa, Artificial Sequence
  source: /note="Description of Artificial Sequence: Synthetic peptide"
  VARIANT (2)..(2): /replace="Ser"
  VARIANT (3)..(3): /replace="Ser"
  VARIANT (4)..(4): /replace="Ser"
  VARIANT (5)..(5): /replace="Ser"
  VARIANT (7)..(7): /replace="Tyr"
  VARIANT (8)..(8): /replace="Ile"
  SITE (1)..(8): /note="Variant residues given in the sequence have no preference with respect to those in the annotations for variant positions"
IKQDGSEK

SEQ ID NO: 189 - protein, 11 aa, Artificial Sequence
  source: /note="Description of Artificial Sequence: Synthetic peptide"
  VARIANT (3)..(3): /replace="Trp"
  VARIANT (5)..(5): /replace="Ser"
  SITE (1)..(11): /note="Variant residues given in the sequence have no preference with respect to those in the annotations for variant positions"
ARALDYYGMDV

SEQ ID NO: 190 - DNA, 521 bp, Unknown
  source: /note="Description of Unknown: PGK Promoter sequence"
acccctctctccagccactaagccagttgctccctcggctgacggctgcacgcgaggcctccgaacgtcttacgccttgtggcgcgcccgtccttgtcccgggtgtgatggcggggtgtggggcggagggcgtggcggggaagggccggcgacgagagccgcgcgggacgactcgtcggcgataaccggtgtcgggtagcgccagccgcgcgacggtaacgagggaccgcgacaggcagacgctcccatgatcactctgcacgccgaaggcaaatagtgcaggccgtgcggcgcttggcgttccttggaagggctgaatccccgcctcgtccttcgcagcggccccccgggtgttcccatcgccgcttctaggcccactgcgacgcttgcctgcacttcttacacgctctgggtcccagccgcggcgacgcaaagggccttggtgcgggtctcgtcggcgcagggacgcgtttgggtcccgacggaaccttttccgcgttggggttggggcaccataagct

SEQ ID NO: 191 - DNA, 221 bp, Artificial Sequence
  source: /note="Description of Artificial Sequence: Synthetic polynucleotide"
acccctctctccagccactaagccagttgctccctcggctgacggctgcacgcgaggcctccgaacgtcttacgccttgtggcgcgcccgtccttgtcccgggtgtgatggcggggtgtggggcggagggcgtggcggggaagggccggcgacgagagccgcgcgggacgactcgtcggcgataaccggtgtcgggtagcgccagccgcgcgacggtaacg

SEQ ID NO: 192 - DNA, 324 bp, Artificial Sequence
  source: /note="Description of Artificial Sequence: Synthetic polynucleotide"
acccctctctccagccactaagccagttgctccctcggctgacggctgcacgcgaggcctccgaacgtcttacgccttgtggcgcgcccgtccttgtcccgggtgtgatggcggggtgtggggcggagggcgtggcggggaagggccggcgacgagagccgcgcgggacgactcgtcggcgataaccggtgtcgggtagcgccagccgcgcgacggtaacgagggaccgcgacaggcagacgctcccatgatcactctgcacgccgaaggcaaatagtgcaggccgtgcggcgcttggcgttccttggaagggctgaatccccg

SEQ ID NO: 193 - DNA, 422 bp, Artificial Sequence
  source: /note="Description of Artificial Sequence: Synthetic polynucleotide"
acccctctctccagccactaagccagttgctccctcggctgacggctgcacgcgaggcctccgaacgtcttacgccttgtggcgcgcccgtccttgtcccgggtgtgatggcggggtgtggggcggagggcgtggcggggaagggccggcgacgagagccgcgcgggacgactcgtcggcgataaccggtgtcgggtagcgccagccgcgcgacggtaacgagggaccgcgacaggcagacgctcccatgatcactctgcacgccgaaggcaaatagtgcaggccgtgcggcgcttggcgttccttggaagggctgaatccccgcctcgtccttcgcagcggccccccgggtgttcccatcgccgcttctaggcccactgcgacgcttgcctgcacttcttacacgctctgggtcccagccg

SEQ ID NO: 194-197 - skipped (4 entries)

SEQ ID NO: 198 - DNA, 118 bp, Artificial Sequence
  source: /note="Description of Artificial Sequence: Synthetic polynucleotide"
acccctctctccagccactaagccagttgctccctcggctgacggctgcacgcgaggcctccgaacgtcttacgccttgtggcgcgcccgtccttgtcccgggtgtgatggcggggtg

SEQ ID NO: 199 - DNA, 63 bp, Artificial Sequence
  source: /note="Description of Artificial Sequence: Synthetic oligonucleotide"
atggccctccctgtcaccgccctgctgcttccgctggctcttctgctccacgccgctcggccc

SEQ ID NO: 200-201 - skipped (2 entries)

SEQ ID NO: 202 - protein, 69 aa, Artificial Sequence
  source: /note="Description of Artificial Sequence: Synthetic polypeptide"
TTTPAPRPPTPAPTIASQPLSLRPEACRPAAGGAVHTRGLDFACDIYIWAPLAGTCGVLLLSLVITLYC

SEQ ID NO: 203-224 - skipped (22 entries)

SEQ ID NO: 225 - protein, 465 aa, Artificial Sequence
  source: /note="Description of Artificial Sequence: Synthetic polypeptide"
EIVMTQSPATLSLSPGERATLSCRASQDISKYLNWYQQKPGQAPRLLIYHTSRLHSGIPARFSGSGSGTDYTLTISSLQPEDFAVYFCQQGNTLPYTFGQGTKLEIKGGGGSGGGGSGGGGSQVQLQESGPGLVKPSETLSLTCTVSGVSLPDYGVSWIRQPPGKGLEWIGVIWGSETTYYQSSLKSRVTISKDNSKNQVSLKLSSVTAADTAVYYCAKHYYYGGSYAMDYWGQGTLVTVSSTTTPAPRPPTPAPTIASQPLSLRPEACRPAAGGAVHTRGLDFACDIYIWAPLAGTCGVLLLSLVITLYCKRGRKKLLYIFKQPFMRPVQTTQEEDGCSCRFPEEEEGGCELRVKFSRSADAPAYQQGQNQLYNELNLGRREEYDVLDKRRGRDPEMGGKPRRKNPQEGLYNELQKDKMAEAYSEIGMKGERRRGKGHDGLYQGLSTATKDTYDALHMQALPPR

SEQ ID NO: 226-249 - skipped (24 entries)

SEQ ID NO: 250 - protein, 120 aa, Artificial Sequence
  source: /note="Description of Artificial Sequence: Synthetic polypeptide"
QVQLQESGPGLVKPSETLSLTCTVSGVSLPDYGVSWIRQPPGKGLEWIGVIWGSETTYYQSSLKSRVTISKDNSKNQVSLKLSSVTAADTAVYYCAKHYYYGGSYAMDYWGQGTLVTVSS

SEQ ID NO: 251 - protein, 107 aa, Artificial Sequence
  source: /note="Description of Artificial Sequence: Synthetic polypeptide"
EIVMTQSPATLSLSPGERATLSCRASQDISKYLNWYQQKPGQAPRLLIYHTSRLHSGIPARFSGSGSGTDYTLTISSLQPEDFAVYFCQQGNTLPYTFGQGTKLEIK

SEQ ID NO: 252 - DNA, 63 bp, Artificial Sequence
  source: /note="Description of Artificial Sequence: Synthetic oligonucleotide"
atggccctccctgtcaccgctctgttgctgccgcttgctctgctgctccacgcagcgcgaccg

SEQ ID NO: 253 - DNA, 747 bp, Artificial Sequence
  source: /note="Description of Artificial Sequence: Synthetic polynucleotide"
caggtacaattgcaggagtctggaggcggtgtggtgcaacccggtcgcagcttgcgcctgagttgtgctgcgtctggatttacattttcatcttacggaatgcattgggtacgccaggcaccggggaaaggccttgaatgggtggctgtaatttcatacgatggttccaacaaatactatgctgactcagtcaagggtcgatttacaattagtcgggacaactccaagaacaccctttatcttcaaatgaattcccttagagcagaggatacggcggtctattactgtggtggcagtggttatgcacttcatgatgattactatggcttggatgtctgggggcaagggacgcttgtaactgtatcctctggtggtggtggtagtggtgggggaggctccggcggtggcggctctcaatctgctctgactcaaccagcaagcgtatcagggtcaccgggacagagtattaccataagttgcacggggacctctagcgatgtaggggggtataattatgtatcttggtatcaacaacaccccgggaaagcccctaaattgatgatctacgacgtgagcaatcgacctagtggcgtatcaaatcgcttctctggtagcaagagtgggaatacggcgtcccttactattagcggattgcaagcagaagatgaggccgattactactgcagctcctatactagctcttctacattgtacgtctttgggagcggaacaaaagtaacagtactc

SEQ ID NO: 254 - DNA, 207 bp, Artificial Sequence
  source: /note="Description of Artificial Sequence: Synthetic polynucleotide"
acaacaacacctgccccgagaccgcctacaccagccccgactattgccagccagcctctgagcctcaggcctgaggcctgtaggcccgcagcgggcggcgcagttcatacacggggcttggatttcgcttgtgatatttatatttgggctcctttggcggggacatgtggcgtgctgcttctgtcacttgttattacactgtactgt

SEQ ID NO: 255 - DNA, 126 bp, Artificial Sequence
  source: /note="Description of Artificial Sequence: Synthetic polynucleotide"
aaacgcgggcgaaaaaaattgctgtatatttttaagcagccatttatgaggcccgttcagacgacgcaggaggaggacggttgctcttgcaggttcccagaagaggaagaagggggctgtgaattg

SEQ ID NO: 256 - DNA, 336 bp, Artificial Sequence
  source: /note="Description of Artificial Sequence: Synthetic polynucleotide"
cgggttaaattttcaagatccgcagacgctccagcataccaacagggacaaaaccaactctataacgagctgaatcttggaagaagggaggaatatgatgtgctggataaacggcgcggtagagatccggagatgggcggaaaaccaaggcgaaaaaaccctcaggagggactctacaacgaactgcagaaagacaaaatggcggaggcttattccgaaataggcatgaagggcgagcggaggcgagggaaagggcacgacggactgtatcaaggcctctcaaccgcgactaaggatacgtacgacgccctgcacatgcaggccctgcctccgaga

SEQ ID NO: 257 - protein, 493 aa, Artificial Sequence
  source: /note="Description of Artificial Sequence: Synthetic polypeptide"
MALPVTALLLPLALLLHAARPQVQLQESGGGVVQPGRSLRLSCAASGFTFSSYGMHWVRQAPGKGLEWVAVISYDGSNKYYADSVKGRFTISRDNSKNTLYLQMNSLRAEDTAVYYCGGSGYALHDDYYGLDVWGQGTLVTVSSGGGGSGGGGSGGGGSQSALTQPASVSGSPGQSITISCTGTSSDVGGYNYVSWYQQHPGKAPKLMIYDVSNRPSGVSNRFSGSKSGNTASLTISGLQAEDEADYYCSSYTSSSTLYVFGSGTKVTVLTTTPAPRPPTPAPTIASQPLSLRPEACRPAAGGAVHTRGLDFACDIYIWAPLAGTCGVLLLSLVITLYCKRGRKKLLYIFKQPFMRPVQTTQEEDGCSCRFPEEEEGGCELRVKFSRSADAPAYQQGQNQLYNELNLGRREEYDVLDKRRGRDPEMGGKPRRKNPQEGLYNELQKDKMAEAYSEIGMKGERRRGKGHDGLYQGLSTATKDTYDALHMQALPPR

SEQ ID NO: 258 - DNA, 1479 bp, Artificial Sequence
  source: /note="Description of Artificial Sequence: Synthetic polynucleotide"
atggccctccctgtcaccgctctgttgctgccgcttgctctgctgctccacgcagcgcgaccgcaggtacaattgcaggagtctggaggcggtgtggtgcaacccggtcgcagcttgcgcctgagttgtgctgcgtctggatttacattttcatcttacggaatgcattgggtacgccaggcaccggggaaaggccttgaatgggtggctgtaatttcatacgatggttccaacaaatactatgctgactcagtcaagggtcgatttacaattagtcgggacaactccaagaacaccctttatcttcaaatgaattcccttagagcagaggatacggcggtctattactgtggtggcagtggttatgcacttcatgatgattactatggcttggatgtctgggggcaagggacgcttgtaactgtatcctctggtggtggtggtagtggtgggggaggctccggcggtggcggctctcaatctgctctgactcaaccagcaagcgtatcagggtcaccgggacagagtattaccataagttgcacggggacctctagcgatgtaggggggtataattatgtatcttggtatcaacaacaccccgggaaagcccctaaattgatgatctacgacgtgagcaatcgacctagtggcgtatcaaatcgcttctctggtagcaagagtgggaatacggcgtcccttactattagcggattgcaagcagaagatgaggccgattactactgcagctcctatactagctcttctacattgtacgtctttgggagcggaacaaaagtaacagtactcacaacaacacctgccccgagaccgcctacaccagccccgactattgccagccagcctctgagcctcaggcctgaggcctgtaggcccgcagcgggcggcgcagttcatacacggggcttggatttcgcttgtgatatttatatttgggctcctttggcggggacatgtggcgtgctgcttctgtcacttgttattacactgtactgtaaacgcgggcgaaaaaaattgctgtatatttttaagcagccatttatgaggcccgttcagacgacgcaggaggaggacggttgctcttgcaggttcccagaagaggaagaagggggctgtgaattgcgggttaaattttcaagatccgcagacgctccagcataccaacagggacaaaaccaactctataacgagctgaatcttggaagaagggaggaatatgatgtgctggataaacggcgcggtagagatccggagatgggcggaaaaccaaggcgaaaaaaccctcaggagggactctacaacgaactgcagaaagacaaaatggcggaggcttattccgaaataggcatgaagggcgagcggaggcgagggaaagggcacgacggactgtatcaaggcctctcaaccgcgactaaggatacgtacgacgccctgcacatgcaggccctgcctccgaga

SEQ ID NO: 259 - DNA, 1416 bp, Artificial Sequence
  source: /note="Description of Artificial Sequence: Synthetic polynucleotide"
caggtacaattgcaggagtctggaggcggtgtggtgcaacccggtcgcagcttgcgcctgagttgtgctgcgtctggatttacattttcatcttacggaatgcattgggtacgccaggcaccggggaaaggccttgaatgggtggctgtaatttcatacgatggttccaacaaatactatgctgactcagtcaagggtcgatttacaattagtcgggacaactccaagaacaccctttatcttcaaatgaattcccttagagcagaggatacggcggtctattactgtggtggcagtggttatgcacttcatgatgattactatggcttggatgtctgggggcaagggacgcttgtaactgtatcctctggtggtggtggtagtggtgggggaggctccggcggtggcggctctcaatctgctctgactcaaccagcaagcgtatcagggtcaccgggacagagtattaccataagttgcacggggacctctagcgatgtaggggggtataattatgtatcttggtatcaacaacaccccgggaaagcccctaaattgatgatctacgacgtgagcaatcgacctagtggcgtatcaaatcgcttctctggtagcaagagtgggaatacggcgtcccttactattagcggattgcaagcagaagatgaggccgattactactgcagctcctatactagctcttctacattgtacgtctttgggagcggaacaaaagtaacagtactcacaacaacacctgccccgagaccgcctacaccagccccgactattgccagccagcctctgagcctcaggcctgaggcctgtaggcccgcagcgggcggcgcagttcatacacggggcttggatttcgcttgtgatatttatatttgggctcctttggcggggacatgtggcgtgctgcttctgtcacttgttattacactgtactgtaaacgcgggcgaaaaaaattgctgtatatttttaagcagccatttatgaggcccgttcagacgacgcaggaggaggacggttgctcttgcaggttcccagaagaggaagaagggggctgtgaattgcgggttaaattttcaagatccgcagacgctccagcataccaacagggacaaaaccaactctataacgagctgaatcttggaagaagggaggaatatgatgtgctggataaacggcgcggtagagatccggagatgggcggaaaaccaaggcgaaaaaaccctcaggagggactctacaacgaactgcagaaagacaaaatggcggaggcttattccgaaataggcatgaagggcgagcggaggcgagggaaagggcacgacggactgtatcaaggcctctcaaccgcgactaaggatacgtacgacgccctgcacatgcaggccctgcctccgaga

SEQ ID NO: 260 - DNA, 369 bp, Artificial Sequence
  source: /note="Description of Artificial Sequence: Synthetic polynucleotide"
caggtacaattgcaggagtctggaggcggtgtggtgcaacccggtcgcagcttgcgcctgagttgtgctgcgtctggatttacattttcatcttacggaatgcattgggtacgccaggcaccggggaaaggccttgaatgggtggctgtaatttcatacgatggttccaacaaatactatgctgactcagtcaagggtcgatttacaattagtcgggacaactccaagaacaccctttatcttcaaatgaattcccttagagcagaggatacggcggtctattactgtggtggcagtggttatgcacttcatgatgattactatggcttggatgtctgggggcaagggacgcttgtaactgtatcctct

SEQ ID NO: 261 - DNA, 333 bp, Artificial Sequence
  source: /note="Description of Artificial Sequence: Synthetic polynucleotide"
caatctgctctgactcaaccagcaagcgtatcagggtcaccgggacagagtattaccataagttgcacggggacctctagcgatgtaggggggtataattatgtatcttggtatcaacaacaccccgggaaagcccctaaattgatgatctacgacgtgagcaatcgacctagtggcgtatcaaatcgcttctctggtagcaagagtgggaatacggcgtcccttactattagcggattgcaagcagaagatgaggccgattactactgcagctcctatactagctcttctacattgtacgtctttgggagcggaacaaaagtaacagtactc

SEQ ID NO: 262-274 - skipped (13 entries)

SEQ ID NO: 275 - protein, 132 aa, Artificial Sequence
  source: /note="Description of Artificial Sequence: Synthetic polypeptide"
DVPDYASLGGPSSPKKKRKVSRGVQVETISPGDGRTFPKRGQTCVVHYTGMLEDGKKFDSSRDRNKPFKFMLGKQEVIRGWEEGVAQMSVGQRAKLTISPDYAYGATGHPGIIPPHATLVFDVELLKLETSY

SEQ ID NO: 276 - protein, 108 aa, Artificial Sequence
  source: /note="Description of Artificial Sequence: Synthetic polypeptide"
VQVETISPGDGRTFPKRGQTCVVHYTGMLEDGKKFDSSRDRNKPFKFMLGKQEVIRGWEEGVAQMSVGQRAKLTISPDYAYGATGHPGIIPPHATLVFDVELLKLETS

SEQ ID NO: 277 - protein, 93 aa, Homo sapiens [sequence omitted]

SEQ ID NO: 278 - protein, 95 aa, Artificial Sequence
  source: /note="Description of Artificial Sequence: Synthetic polypeptide"
ILWHEMWHEGLIEASRLYFGERNVKGMFEVLEPLHAMMERGPQTLKETSFNQAYGRDLMEAQEWCRKYMKSGNVKDLTQAWDLYYHVFRRISKTS

SEQ ID NO: 279 - protein, 95 aa, Artificial Sequence
  source: /note="Description of Artificial Sequence: Synthetic polypeptide"
ILWHEMWHEGLLEASRLYFGERNVKGMFEVLEPLHAMMERGPQTLKETSFNQAYGRDLMEAQEWCRKYMKSGNVKDLTQAWDLYYHVFRRISKTS

SEQ ID NO: 280 - protein, 95 aa, Artificial Sequence
  source: /note="Description of Artificial Sequence: Synthetic polypeptide"
ILWHEMWHEGLEEASRLYFGERNVKGMFEVLEPLHAMMERGPQTLKETSFNQAYGRDLMEAQEWCRKYMKSGNVKDLLQAWDLYYHVFRRISKTS

SEQ ID NO: 281 - protein, 95 aa, Artificial Sequence
  source: /note="Description of Artificial Sequence: Synthetic polypeptide"
  MOD_RES (12)..(12): Any amino acid
  MOD_RES (78)..(78): Any amino acid
ILWHEMWHEGLXEASRLYFGERNVKGMFEVLEPLHAMMERGPQTLKETSFNQAYGRDLMEAQEWCRKYMKSGNVKDLXQAWDLYYHVFRRISKTS

SEQ ID NO: 282 - protein, 95 aa, Artificial Sequence
  source: /note="Description of Artificial Sequence: Synthetic polypeptide"
ILWHEMWHEGLIEASRLYFGERNVKGMFEVLEPLHAMMERGPQTLKETSFNQAYGRDLMEAQEWCRKYMKSGNVKDLLQAWDLYYHVFRRISKTS

SEQ ID NO: 283 - protein, 95 aa, Artificial Sequence
  source: /note="Description of Artificial Sequence: Synthetic polypeptide"
ILWHEMWHEGLLEASRLYFGERNVKGMFEVLEPLHAMMERGPQTLKETSFNQAYGRDLMEAQEWCRKYMKSGNVKDLLQAWDLYYHVFRRISKTS

SEQ ID NO: 284 - protein, 1132 aa, Homo sapiens [sequence omitted]

SEQ ID NO: 285 - protein, 253 aa, Artificial Sequence
  source: /note="Description of Artificial Sequence: Synthetic polypeptide"
EVQLQQSGPGLVKPSQTLSLTCAISGDSMLSNSDTWNWIRQSPSRGLEWLGRTYHRSTWYDDYASSVRGRVSINVDTSKNQYSLQLNAVTPEDTGVYYCARVRLQDGNSWSDAFDVWGQGTMVTVSSGGGGSGGGGSGGGGSQSALTQPASASGSPGQSVTISCTGTSSDVGGYNYVSWYQQHPGKAPKLMIYDVSNRPSGVSNRFSGSKSGNTASLTISGLQAEDEADYYCSSYTSSSTLYVFGTGTQLTVL

SEQ ID NO: 286 - protein, 127 aa, Artificial Sequence
  source: /note="Description of Artificial Sequence: Synthetic polypeptide"
EVQLQQSGPGLVKPSQTLSLTCAISGDSMLSNSDTWNWIRQSPSRGLEWLGRTYHRSTWYDDYASSVRGRVSINVDTSKNQYSLQLNAVTPEDTGVYYCARVRLQDGNSWSDAFDVWGQGTMVTVSS

SEQ ID NO: 287 - protein, 111 aa, Artificial Sequence
  source: /note="Description of Artificial Sequence: Synthetic polypeptide"
QSALTQPASASGSPGQSVTISCTGTSSDVGGYNYVSWYQQHPGKAPKLMIYDVSNRPSGVSNRFSGSKSGNTASLTISGLQAEDEADYYCSSYTSSSTLYVFGTGTQLTVL

SEQ ID NO: 288 - protein, 12 aa, Artificial Sequence
  source: /note="Description of Artificial Sequence: Synthetic peptide"
GDSMLSNSDTWN

SEQ ID NO: 289 - protein, 7 aa, Artificial Sequence
  source: /note="Description of Artificial Sequence: Synthetic peptide"
SNSDTWN

SEQ ID NO: 290 - protein, 18 aa, Artificial Sequence
  source: /note="Description of Artificial Sequence: Synthetic peptide"
RTYHRSTWYDDYASSVRG

SEQ ID NO: 291 - protein, 15 aa, Artificial Sequence
  source: /note="Description of Artificial Sequence: Synthetic peptide"
VRLQDGNSWSDAFDV

SEQ ID NO: 292 - protein, 465 aa, Artificial Sequence
  source: /note="Description of Artificial Sequence: Synthetic polypeptide"
DIQMTQTTSSLSASLGDRVTISCRASQDISKYLNWYQQKPDGTVKLLIYHTSRLHSGVPSRFSGSGSGTDYSLTISNLEQEDIATYFCQQGNTLPYTFGGGTKLEITGGGGSGGGGSGGGGSEVKLQESGPGLVAPSQSLSVTCTVSGVSLPDYGVSWIRQPPRKGLEWLGVIWGSETTYYNSALKSRLTIIKDNSKSQVFLKMNSLQTDDTAIYYCAKHYYYGGSYAMDYWGQGTSVTVSSTTTPAPRPPTPAPTIASQPLSLRPEACRPAAGGAVHTRGLDFACDIYIWAPLAGTCGVLLLSLVITLYCKRGRKKLLYIFKQPFMRPVQTTQEEDGCSCRFPEEEEGGCELRVKFSRSADAPAYKQGQNQLYNELNLGRREEYDVLDKRRGRDPEMGGKPRRKNPQEGLYNELQKDKMAEAYSEIGMKGERRRGKGHDGLYQGLSTATKDTYDALHMQALPPR

SEQ ID NO: 293 - protein, 242 aa, Artificial Sequence
  source: /note="Description of Artificial Sequence: Synthetic polypeptide"
EIVMTQSPATLSLSPGERATLSCRASQDISKYLNWYQQKPGQAPRLLIYHTSRLHSGIPARFSGSGSGTDYTLTISSLQPEDFAVYFCQQGNTLPYTFGQGTKLEIKGGGGSGGGGSGGGGSQVQLQESGPGLVKPSETLSLTCTVSGVSLPDYGVSWIRQPPGKGLEWIGVIWGSETTYYQSSLKSRVTISKDNSKNQVSLKLSSVTAADTAVYYCAKHYYYGGSYAMDYWGQGTLVTVSS

SEQ ID NO: 294 - protein, 465 aa, Artificial Sequence
  source: /note="Description of Artificial Sequence: Synthetic polypeptide"
EIVMTQSPATLSLSPGERATLSCRASQDISKYLNWYQQKPGQAPRLLIYHTSRLHSGIPARFSGSGSGTDYTLTISSLQPEDFAVYFCQQGNTLPYTFGQGTKLEIKGGGGSGGGGSGGGGSQVQLQESGPGLVKPSETLSLTCTVSGVSLPDYGVSWIRQPPGKGLEWIGVIWGSETTYYQSSLKSRVTISKDNSKNQVSLKLSSVTAADTAVYYCAKHYYYGGSYAMDYWGQGTLVTVSSTTTPAPRPPTPAPTIASQPLSLRPEACRPAAGGAVHTRGLDFACDIYIWAPLAGTCGVLLLSLVITLYCKRGRKKLLYIFKQPFMRPVQTTQEEDGCSCRFPEEEEGGCELRVKFSRSADAPAYKQGQNQLYNELNLGRREEYDVLDKRRGRDPEMGGKPRRKNPQEGLYNELQKDKMAEAYSEIGMKGERRRGKGHDGLYQGLSTATKDTYDALHMQALPPR

SEQ ID NO: 295 - protein, 5 aa, Artificial Sequence
  source: /note="Description of Artificial Sequence: Synthetic peptide"
DYGVS

SEQ ID NO: 296 - protein, 16 aa, Artificial Sequence
  source: /note="Description of Artificial Sequence: Synthetic peptide"
VIWGSETTYYNSALKS

SEQ ID NO: 297 - protein, 12 aa, Artificial Sequence
  source: /note="Description of Artificial Sequence: Synthetic peptide"
HYYYGGSYAMDY

SEQ ID NO: 298 - protein, 11 aa, Artificial Sequence
  source: /note="Description of Artificial Sequence: Synthetic peptide"
RASQDISKYLN

SEQ ID NO: 299 - protein, 7 aa, Artificial Sequence
  source: /note="Description of Artificial Sequence: Synthetic peptide"
HTSRLHS

SEQ ID NO: 300 - protein, 9 aa, Artificial Sequence
  source: /note="Description of Artificial Sequence: Synthetic peptide"
QQGNTLPYT

SEQ ID NO: 301 - protein, 486 aa, Artificial Sequence
  source: /note="Description of Artificial Sequence: Synthetic polypeptide"
MALPVTALLLPLALLLHAARPDIQMTQTTSSLSASLGDRVTISCRASQDISKYLNWYQQKPDGTVKLLIYHTSRLHSGVPSRFSGSGSGTDYSLTISNLEQEDIATYFCQQGNTLPYTFGGGTKLEITGGGGSGGGGSGGGGSEVKLQESGPGLVAPSQSLSVTCTVSGVSLPDYGVSWIRQPPRKGLEWLGVIWGSETTYYNSALKSRLTIIKDNSKSQVFLKMNSLQTDDTAIYYCAKHYYYGGSYAMDYWGQGTSVTVSSTTTPAPRPPTPAPTIASQPLSLRPEACRPAAGGAVHTRGLDFACDIYIWAPLAGTCGVLLLSLVITLYCKRGRKKLLYIFKQPFMRPVQTTQEEDGCSCRFPEEEEGGCELRVKFSRSADAPAYKQGQNQLYNELNLGRREEYDVLDKRRGRDPEMGGKPRRKNPQEGLYNELQKDKMAEAYSEIGMKGERRRGKGHDGLYQGLSTATKDTYDALHMQALPPR

SEQ ID NO: 302 - DNA, 1458 bp, Artificial Sequence
  source: /note="Description of Artificial Sequence: Synthetic polynucleotide"
atggccttaccagtgaccgccttgctcctgccgctggccttgctgctccacgccgccaggccggacatccagatgacacagactacatcctccctgtctgcctctctgggagacagagtcaccatcagttgcagggcaagtcaggacattagtaaatatttaaattggtatcagcagaaaccagatggaactgttaaactcctgatctaccatacatcaagattacactcaggagtcccatcaaggttcagtggcagtgggtctggaacagattattctctcaccattagcaacctggagcaagaagatattgccacttacttttgccaacagggtaatacgcttccgtacacgttcggaggggggaccaagctggagatcacaggtggcggtggctcgggcggtggtgggtcgggtggcggcggatctgaggtgaaactgcaggagtcaggacctggcctggtggcgccctcacagagcctgtccgtcacatgcactgtctcaggggtctcattacccgactatggtgtaagctggattcgccagcctccacgaaagggtctggagtggctgggagtaatatggggtagtgaaaccacatactataattcagctctcaaatccagactgaccatcatcaaggacaactccaagagccaagttttcttaaaaatgaacagtctgcaaactgatgacacagccatttactactgtgccaaacattattactacggtggtagctatgctatggactactggggccaaggaacctcagtcaccgtctcctcaaccacgacgccagcgccgcgaccaccaacaccggcgcccaccatcgcgtcgcagcccctgtccctgcgcccagaggcgtgccggccagcggcggggggcgcagtgcacacgagggggctggacttcgcctgtgatatctacatctgggcgcccttggccgggacttgtggggtccttctcctgtcactggttatcaccctttactgcaaacggggcagaaagaaactcctgtatatattcaaacaaccatttatgagaccagtacaaactactcaagaggaagatggctgtagctgccgatttccagaagaagaagaaggaggatgtgaactgagagtgaagttcagcaggagcgcagacgcccccgcgtacaagcagggccagaaccagctctataacgagctcaatctaggacgaagagaggagtacgatgttttggacaagagacgtggccgggaccctgagatggggggaaagccgagaaggaagaaccctcaggaaggcctgtacaatgaactgcagaaagataagatggcggaggcctacagtgagattgggatgaaaggcgagcgccggaggggcaaggggcacgatggcctttaccagggtctcagtacagccaccaaggacacctacgacgcccttcacatgcaggccctgccccctcgc

SEQ ID NO: 303 - protein, 242 aa, Artificial Sequence
  source: /note="Description of Artificial Sequence: Synthetic polypeptide"
DIQMTQTTSSLSASLGDRVTISCRASQDISKYLNWYQQKPDGTVKLLIYHTSRLHSGVPSRFSGSGSGTDYSLTISNLEQEDIATYFCQQGNTLPYTFGGGTKLEITGGGGSGGGGSGGGGSEVKLQESGPGLVAPSQSLSVTCTVSGVSLPDYGVSWIRQPPRKGLEWLGVIWGSETTYYNSALKSRLTIIKDNSKSQVFLKMNSLQTDDTAIYYCAKHYYYGGSYAMDYWGQGTSVTVSS

SEQ ID NO: 304 - protein, 16 aa, Artificial Sequence
  source: /note="Description of Artificial Sequence: Synthetic peptide"
VIWGSETTYYQSSLKS

SEQ ID NO: 305 - DNA, 813 bp, Artificial Sequence
  source: /note="Description of Artificial Sequence: Synthetic polynucleotide"
atggccctccctgtcaccgccctgctgcttccgctggctcttctgctccacgccgctcggcccgaaattgtgatgacccagtcacccgccactcttagcctttcacccggtgagcgcgcaaccctgtcttgcagagcctcccaagacatctcaaaataccttaattggtatcaacagaagcccggacaggctcctcgccttctgatctaccacaccagccggctccattctggaatccctgccaggttcagcggtagcggatctgggaccgactacaccctcactatcagctcactgcagccagaggacttcgctgtctatttctgtcagcaagggaacaccctgccctacacctttggacagggcaccaagctcgagattaaaggtggaggtggcagcggaggaggtgggtccggcggtggaggaagccaggtccaactccaagaaagcggaccgggtcttgtgaagccatcagaaactctttcactgacttgtactgtgagcggagtgtctctccccgattacggggtgtcttggatcagacagccaccggggaagggtctggaatggattggagtgatttggggctctgagactacttactaccaatcatccctcaagtcacgcgtcaccatctcaaaggacaactctaagaatcaggtgtcactgaaactgtcatctgtgaccgcagccgacaccgccgtgtactattgcgctaagcattactattatggcgggagctacgcaatggattactggggacagggtactctggtcaccgtgtccagccaccaccatcatcaccatcaccat

SEQ ID NO: 306 - protein, 486 aa, Artificial Sequence
  source: /note="Description of Artificial Sequence: Synthetic polypeptide"
MALPVTALLLPLALLLHAARPEIVMTQSPATLSLSPGERATLSCRASQDISKYLNWYQQKPGQAPRLLIYHTSRLHSGIPARFSGSGSGTDYTLTISSLQPEDFAVYFCQQGNTLPYTFGQGTKLEIKGGGGSGGGGSGGGGSQVQLQESGPGLVKPSETLSLTCTVSGVSLPDYGVSWIRQPPGKGLEWIGVIWGSETTYYQSSLKSRVTISKDNSKNQVSLKLSSVTAADTAVYYCAKHYYYGGSYAMDYWGQGTLVTVSSTTTPAPRPPTPAPTIASQPLSLRPEACRPAAGGAVHTRGLDFACDIYIWAPLAGTCGVLLLSLVITLYCKRGRKKLLYIFKQPFMRPVQTTQEEDGCSCRFPEEEEGGCELRVKFSRSADAPAYKQGQNQLYNELNLGRREEYDVLDKRRGRDPEMGGKPRRKNPQEGLYNELQKDKMAEAYSEIGMKGERRRGKGHDGLYQGLSTATKDTYDALHMQALPPR

SEQ ID NO: 307 - DNA, 1458 bp, Artificial Sequence
  source: /note="Description of Artificial Sequence: Synthetic polynucleotide"
atggccctccctgtcaccgccctgctgcttccgctggctcttctgctccacgccgctcggcccgaaattgtgatgacccagtcacccgccactcttagcctttcacccggtgagcgcgcaaccctgtcttgcagagcctcccaagacatctcaaaataccttaattggtatcaacagaagcccggacaggctcctcgccttctgatctaccacaccagccggctccattctggaatccctgccaggttcagcggtagcggatctgggaccgactacaccctcactatcagctcactgcagccagaggacttcgctgtctatttctgtcagcaagggaacaccctgccctacacctttggacagggcaccaagctcgagattaaaggtggaggtggcagcggaggaggtgggtccggcggtggaggaagccaggtccaactccaagaaagcggaccgggtcttgtgaagccatcagaaactctttcactgacttgtactgtgagcggagtgtctctccccgattacggggtgtcttggatcagacagccaccggggaagggtctggaatggattggagtgatttggggctctgagactacttactaccaatcatccctcaagtcacgcgtcaccatctcaaaggacaactctaagaatcaggtgtcactgaaactgtcatctgtgaccgcagccgacaccgccgtgtactattgcgctaagcattactattatggcgggagctacgcaatggattactggggacagggtactctggtcaccgtgtccagcaccactaccccagcaccgaggccacccaccccggctcctaccatcgcctcccagcctctgtccctgcgtccggaggcatgtagacccgcagctggtggggccgtgcatacccggggtcttgacttcgcctgcgatatctacatttgggcccctctggctggtacttgcggggtcctgctgctttcactcgtgatcactctttactgtaagcgcggtcggaagaagctgctgtacatctttaagcaacccttcatgaggcctgtgcagactactcaagaggaggacggctgttcatgccggttcccagaggaggaggaaggcggctgcgaactgcgcgtgaaattcagccgcagcgcagatgctccagcctacaagcaggggcagaaccagctctacaacgaactcaatcttggtcggagagaggagtacgacgtgctggacaagcggagaggacgggacccagaaatgggcgggaagccgcgcagaaagaatccccaagagggcctgtacaacgagctccaaaaggataagatggcagaagcctatagcgagattggtatgaaaggggaacgcagaagaggcaaaggccacgacggactgtaccagggactcagcaccgccaccaaggacacctatgacgctcttcacatgcaggccctgccgcctcgg

SEQ ID NO: 308 - protein, 7 aa, Artificial Sequence
  source: /note="Description of Artificial Sequence: Synthetic peptide"
LAEAAAK

SEQ ID NO: 309 - protein, 284 aa, Artificial Sequence
  source: /note="Description of Artificial Sequence: Synthetic polypeptide"
NWVNVISDLKKIEDLIQSMHIDATLYTESDVHPSCKVTAMKCFLLELQVISLESGDASIHDTVENLIILANNSLSSNGNVTESGCKECEELEEKNIKEFLQSFVHIVQMFINTSITCPPPMSVEHADIWVKSYSLYSRERYICNSGFKRKAGTSSLTECVLNKATNVAHWTTPSLKCIRDPALVHQRPAPPSTVTTAGVTPQPESLSPSGKEPAASSPSSNNTAATTAAIVPGSQLMPSKSPSTGTTEISSHESSHGTPSQTTAKNWELTASASHQPPGVYPQG

SEQ ID NO: 310-330 - skipped (21 entries)

SEQ ID NO: 331 - protein, 120 aa, Artificial Sequence
  source: /note="Description of Artificial Sequence: Synthetic polypeptide"
QVQLQESGPGLVKPSETLSLTCTVSGVSLPDYGVSWIRQPPGKCLEWIGVIWGSETTYYQSSLKSRVTISKDNSKNQVSLKLSSVTAADTAVYYCAKHYYYGGSYAMDYWGQGTLVTVSS

SEQ ID NO: 332 - protein, 107 aa, Artificial Sequence
  source: /note="Description of Artificial Sequence: Synthetic polypeptide"
EIVMTQSPATLSLSPGERATLSCRASQDISKYLNWYQQKPGQAPRLLIYHTSRLHSGIPARFSGSGSGTDYTLTISSLQPEDFAVYFCQQGNTLPYTFGCGTKLEIK

SEQ ID NO: 333-348 - skipped (16 entries)

SEQ ID NO: 349 - protein, 486 aa, Artificial Sequence
  source: /note="Description of Artificial Sequence: Synthetic polypeptide"
MALPVTALLLPLALLLHAARPEIVMTQSPATLSLSPGERATLSCRASQDISKYLNWYQQKPGQAPRLLIYHTSRLHSGIPARFSGSGSGTDYTLTISSLQPEDFAVYFCQQGNTLPYTFGQGTKLEIKGGGGSGGGGSGGGGSQVQLQESGPGLVKPSETLSLTCTVSGVSLPDYGVSWIRQPPGKGLEWIGVIWGSETTYYQSSLKSRVTISKDNSKNQVSLKLSSVTAADTAVYYCAKHYYYGGSYAMDYWGQGTLVTVSSTTTPAPRPPTPAPTIASQPLSLRPEACRPAAGGAVHTRGLDFACDIYIWAPLAGTCGVLLLSLVITLYCKRGRKKLLYIFKQPFMRPVQTTQEEDGCSCRFPEEEEGGCELRVKFSRSADAPAYQQGQNQLYNELNLGRREEYDVLDKRRGRDPEMGGKPRRKNPQEGLYNELQKDKMAEAYSEIGMKGERRRGKGHDGLYQGLSTATKDTYDALHMQALPPR

SEQ ID NO: 350-353 - skipped (4 entries)

SEQ ID NO: 354 - DNA, 1461 bp, Artificial Sequence
  source: /note="Description of Artificial Sequence: Synthetic polynucleotide"
atggccctccctgtcaccgccctgctgcttccgctggctcttctgctccacgccgctcggcccgaaattgtgatgacccagtcacccgccactcttagcctttcacccggtgagcgcgcaaccctgtcttgcagagcctcccaagacatctcaaaataccttaattggtatcaacagaagcccggacaggctcctcgccttctgatctaccacaccagccggctccattctggaatccctgccaggttcagcggtagcggatctgggaccgactacaccctcactatcagctcactgcagccagaggacttcgctgtctatttctgtcagcaagggaacaccctgccctacacctttggacagggcaccaagctcgagattaaaggtggaggtggcagcggaggaggtgggtccggcggtggaggaagccaggtccaactccaagaaagcggaccgggtcttgtgaagccatcagaaactctttcactgacttgtactgtgagcggagtgtctctccccgattacggggtgtcttggatcagacagccaccggggaagggtctggaatggattggagtgatttggggctctgagactacttactaccaatcatccctcaagtcacgcgtcaccatctcaaaggacaactctaagaatcaggtgtcactgaaactgtcatctgtgaccgcagccgacaccgccgtgtactattgcgctaagcattactattatggcgggagctacgcaatggattactggggacagggtactctggtcaccgtgtccagcaccactaccccagcaccgaggccacccaccccggctcctaccatcgcctcccagcctctgtccctgcgtccggaggcatgtagacccgcagctggtggggccgtgcatacccggggtcttgacttcgcctgcgatatctacatttgggcccctctggctggtacttgcggggtcctgctgctttcactcgtgatcactctttactgtaagcgcggtcggaagaagctgctgtacatctttaagcaacccttcatgaggcctgtgcagactactcaagaggaggacggctgttcatgccggttcccagaggaggaggaaggcggctgcgaactgcgcgtgaaattcagccgcagcgcagatgctccagcctaccagcaggggcagaaccagctctacaacgaactcaatcttggtcggagagaggagtacgacgtgctggacaagcggagaggacgggacccagaaatgggcgggaagccgcgcagaaagaatccccaagagggcctgtacaacgagctccaaaaggataagatggcagaagcctatagcgagattggtatgaaaggggaacgcagaagaggcaaaggccacgacggactgtaccagggactcagcaccgccaccaaggacacctatgacgctcttcacatgcaggccctgccgcctcggtaa

SEQ ID NO: 355 - DNA, 1458 bp, Artificial Sequence
  source: /note="Description of Artificial Sequence: Synthetic polynucleotide"
atggccctccctgtcaccgccctgctgcttccgctggctcttctgctccacgccgctcggcccgaaattgtgatgacccagtcacccgccactcttagcctttcacccggtgagcgcgcaaccctgtcttgcagagcctcccaagacatctcaaaataccttaattggtatcaacagaagcccggacaggctcctcgccttctgatctaccacaccagccggctccattctggaatccctgccaggttcagcggtagcggatctgggaccgactacaccctcactatcagctcactgcagccagaggacttcgctgtctatttctgtcagcaagggaacaccctgccctacacctttggacagggcaccaagctcgagattaaaggtggaggtggcagcggaggaggtgggtccggcggtggaggaagccaggtccaactccaagaaagcggaccgggtcttgtgaagccatcagaaactctttcactgacttgtactgtgagcggagtgtctctccccgattacggggtgtcttggatcagacagccaccggggaagggtctggaatggattggagtgatttggggctctgagactacttactaccaatcatccctcaagtcacgcgtcaccatctcaaaggacaactctaagaatcaggtgtcactgaaactgtcatctgtgaccgcagccgacaccgccgtgtactattgcgctaagcattactattatggcgggagctacgcaatggattactggggacagggtactctggtcaccgtgtccagcaccactaccccagcaccgaggccacccaccccggctcctaccatcgcctcccagcctctgtccctgcgtccggaggcatgtagacccgcagctggtggggccgtgcatacccggggtcttgacttcgcctgcgatatctacatttgggcccctctggctggtacttgcggggtcctgctgctttcactcgtgatcactctttactgtaagcgcggtcggaagaagctgctgtacatctttaagcaacccttcatgaggcctgtgcagactactcaagaggaggacggctgttcatgccggttcccagaggaggaggaaggcggctgcgaactgcgcgtgaaattcagccgcagcgcagatgctccagcctaccagcaggggcagaaccagctctacaacgaactcaatcttggtcggagagaggagtacgacgtgctggacaagcggagaggacgggacccagaaatgggcgggaagccgcgcagaaagaatccccaagagggcctgtacaacgagctccaaaaggataagatggcagaagcctatagcgagattggtatgaaaggggaacgcagaagaggcaaaggccacgacggactgtaccagggactcagcaccgccaccaaggacacctatgacgctcttcacatgcaggccctgccgcctcgg

SEQ ID NO: 356 - DNA, 1398 bp, Artificial Sequence
  source: /note="Description of Artificial Sequence: Synthetic polynucleotide"
gaaattgtgatgacccagtcacccgccactcttagcctttcacccggtgagcgcgcaaccctgtcttgcagagcctcccaagacatctcaaaataccttaattggtatcaacagaagcccggacaggctcctcgccttctgatctaccacaccagccggctccattctggaatccctgccaggttcagcggtagcggatctgggaccgactacaccctcactatcagctcactgcagccagaggacttcgctgtctatttctgtcagcaagggaacaccctgccctacacctttggacagggcaccaagctcgagattaaaggtggaggtggcagcggaggaggtgggtccggcggtggaggaagccaggtccaactccaagaaagcggaccgggtcttgtgaagccatcagaaactctttcactgacttgtactgtgagcggagtgtctctccccgattacggggtgtcttggatcagacagccaccggggaagggtctggaatggattggagtgatttggggctctgagactacttactaccaatcatccctcaagtcacgcgtcaccatctcaaaggacaactctaagaatcaggtgtcactgaaactgtcatctgtgaccgcagccgacaccgccgtgtactattgcgctaagcattactattatggcgggagctacgcaatggattactggggacagggtactctggtcaccgtgtccagcaccactaccccagcaccgaggccacccaccccggctcctaccatcgcctcccagcctctgtccctgcgtccggaggcatgtagacccgcagctggtggggccgtgcatacccggggtcttgacttcgcctgcgatatctacatttgggcccctctggctggtacttgcggggtcctgctgctttcactcgtgatcactctttactgtaagcgcggtcggaagaagctgctgtacatctttaagcaacccttcatgaggcctgtgcagactactcaagaggaggacggctgttcatgccggttcccagaggaggaggaaggcggctgcgaactgcgcgtgaaattcagccgcagcgcagatgctccagcctaccagcaggggcagaaccagctctacaacgaactcaatcttggtcggagagaggagtacgacgtgctggacaagcggagaggacgggacccagaaatgggcgggaagccgcgcagaaagaatccccaagagggcctgtacaacgagctccaaaaggataagatggcagaagcctatagcgagattggtatgaaaggggaacgcagaagaggcaaaggccacgacggactgtaccagggactcagcaccgccaccaaggacacctatgacgctcttcacatgcaggccctgccgcctcggtaa

SEQ ID NO: 357-415 - skipped (59 entries)

SEQ ID NO: 416 - DNA, 1485 bp, Artificial Sequence
  source: /note="Description of Artificial Sequence: Synthetic polynucleotide"
atggccctccctgtcaccgctctgttgctgccgcttgctctgctgctccacgcagcgcgaccgcaggtacaattgcaggagtctggaggcggtgtggtgcaacccggtcgcagcttgcgcctgagttgtgctgcgtctggatttacattttcatcttacggaatgcattgggtacgccaggcaccggggaaaggccttgaatgggtggctgtaatttcatacgatggttccaacaaatactatgctgactcagtcaagggtcgatttacaattagtcgggacaactccaagaacaccctttatcttcaaatgaattcccttagagcagaggatacggcggtctattactgtggtggcagtggttatgcacttcatgatgattactatggcttggatgtctgggggcaagggacgcttgtaactgtatcctctggtggtggtggtagtggtgggggaggctccggcggtggcggctctcaatctgctctgactcaaccagcaagcgtatcagggtcaccgggacagagtattaccataagttgcacggggacctctagcgatgtaggggggtataattatgtatcttggtatcaacaacaccccgggaaagcccctaaattgatgatctacgacgtgagcaatcgacctagtggcgtatcaaatcgcttctctggtagcaagagtgggaatacggcgtcccttactattagcggattgcaagcagaagatgaggccgattactactgcagctcctatactagctcttctacattgtacgtctttgggagcggaacaaaagtaacagtactcacaacaacacctgccccgagaccgcctacaccagccccgactattgccagccagcctctgagcctcaggcctgaggcctgtaggcccgcagcgggcggcgcagttcatacacggggcttggatttcgcttgtgatatttatatttgggctcctttggcggggacatgtggcgtgctgcttctgtcacttgttattacactgtactgtaaacgcgggcgaaaaaaattgctgtatatttttaagcagccatttatgaggcccgttcagacgacgcaggaggaggacggttgctcttgcaggttcccagaagaggaagaagggggctgtgaattgcgggttaaattttcaagatccgcagacgctccagcataccaacagggacaaaaccaactctataacgagctgaatcttggaagaagggaggaatatgatgtgctggataaacggcgcggtagagatccggagatgggcggaaaaccaaggcgaaaaaaccctcaggagggactctacaacgaactgcagaaagacaaaatggcggaggcttattccgaaataggcatgaagggcgagcggaggcgagggaaagggcacgacggactgtatcaaggcctctcaaccgcgactaaggatacgtacgacgccctgcacatgcaggccctgcctccgagatgataa

SEQ ID NO: 417 - DNA, 1395 bp, Artificial Sequence
  source: /note="Description of Artificial Sequence: Synthetic polynucleotide"
gaaattgtgatgacccagtcacccgccactcttagcctttcacccggtgagcgcgcaaccctgtcttgcagagcctcccaagacatctcaaaataccttaattggtatcaacagaagcccggacaggctcctcgccttctgatctaccacaccagccggctccattctggaatccctgccaggttcagcggtagcggatctgggaccgactacaccctcactatcagctcactgcagccagaggacttcgctgtctatttctgtcagcaagggaacaccctgccctacacctttggacagggcaccaagctcgagattaaaggtggaggtggcagcggaggaggtgggtccggcggtggaggaagccaggtccaactccaagaaagcggaccgggtcttgtgaagccatcagaaactctttcactgacttgtactgtgagcggagtgtctctccccgattacggggtgtcttggatcagacagccaccggggaagggtctggaatggattggagtgatttggggctctgagactacttactaccaatcatccctcaagtcacgcgtcaccatctcaaaggacaactctaagaatcaggtgtcactgaaactgtcatctgtgaccgcagccgacaccgccgtgtactattgcgctaagcattactattatggcgggagctacgcaatggattactggggacagggtactctggtcaccgtgtccagcaccactaccccagcaccgaggccacccaccccggctcctaccatcgcctcccagcctctgtccctgcgtccggaggcatgtagacccgcagctggtggggccgtgcatacccggggtcttgacttcgcctgcgatatctacatttgggcccctctggctggtacttgcggggtcctgctgctttcactcgtgatcactctttactgtaagcgcggtcggaagaagctgctgtacatctttaagcaacccttcatgaggcctgtgcagactactcaagaggaggacggctgttcatgccggttcccagaggaggaggaaggcggctgcgaactgcgcgtgaaattcagccgcagcgcagatgctccagcctaccagcaggggcagaaccagctctacaacgaactcaatcttggtcggagagaggagtacgacgtgctggacaagcggagaggacgggacccagaaatgggcgggaagccgcgcagaaagaatccccaagagggcctgtacaacgagctccaaaaggataagatggcagaagcctatagcgagattggtatgaaaggggaacgcagaagaggcaaaggccacgacggactgtaccagggactcagcaccgccaccaaggacacctatgacgctcttcacatgcaggccctgccgcctcgg

SEQ ID NO: 418 - DNA, 19 bp, Artificial Sequence
  source: /note="Description of Artificial Sequence: Synthetic oligonucleotide"
gggtaagccaagaaagaaa

SEQ ID NO: 419 - DNA, 19 bp, Artificial Sequence
  source: /note="Description of Artificial Sequence: Synthetic oligonucleotide"
tttctttcttggcttaccc

SEQ ID NO: 420 - protein, 10 aa, Artificial Sequence
  source: /note="Description of Artificial Sequence: Synthetic peptide"
SASSSVSYMN

SEQ ID NO: 421 - protein, 7 aa, Artificial Sequence
  source: /note="Description of Artificial Sequence: Synthetic peptide"
DTSKLAS

SEQ ID NO: 422 - protein, 9 aa, Artificial Sequence
  source: /note="Description of Artificial Sequence: Synthetic peptide"
QQWSSNPFT

SEQ ID NO: 423 - protein, 6 aa, Artificial Sequence
  source: /note="Description of Artificial Sequence: Synthetic peptide"
SSSVSY

SEQ ID NO: 424 - protein, 3 aa, Artificial Sequence
  source: /note="Description of Artificial Sequence: Synthetic peptide"
DTS

SEQ ID NO: 425 - protein, 6 aa, Artificial Sequence
  source: /note="Description of Artificial Sequence: Synthetic peptide"
WSSNPF

SEQ ID NO: 426 - protein, 5 aa, Artificial Sequence
  source: /note="Description of Artificial Sequence: Synthetic peptide"
SSVSY

SEQ ID NO: 427 - protein, 106 aa, Artificial Sequence [sequence omitted]

SEQ ID NO: 428 - protein, 10 aa, Artificial Sequence
  source: /note="Description of Artificial Sequence: Synthetic peptide"
GYTFTRYTMH

SEQ ID NO: 429 - protein, 17 aa, Artificial Sequence
  source: /note="Description of Artificial Sequence: Synthetic peptide"
YINPSRGYTNYNQKVKD

SEQ ID NO: 430 - protein, 10 aa, Artificial Sequence
  source: /note="Description of Artificial Sequence: Synthetic peptide"
YYDDHYSLDY

SEQ ID NO: 431 - protein, 5 aa, Artificial Sequence
  source: /note="Description of Artificial Sequence: Synthetic peptide"
RYTMH

SEQ ID NO: 432 - protein, 7 aa, Artificial Sequence
  source: /note="Description of Artificial Sequence: Synthetic peptide"
GYTFTRY

SEQ ID NO: 433 - protein, 6 aa, Artificial Sequence
  source: /note="Description of Artificial Sequence: Synthetic peptide"
NPSRGY

SEQ ID NO: 434 - protein, 8 aa, Artificial Sequence
  source: /note="Description of Artificial Sequence: Synthetic peptide"
GYTFTRYT

SEQ ID NO: 435 - protein, 8 aa, Artificial Sequence
  source: /note="Description of Artificial Sequence: Synthetic peptide"
INPSRGYT

SEQ ID NO: 436 - protein, 12 aa, Artificial Sequence
  source: /note="Description of Artificial Sequence: Synthetic peptide"
ARYYDDHYSLDY

SEQ ID NO: 437 - protein, 119 aa, Artificial Sequence
  source: /note="Description of Artificial Sequence: Synthetic polypeptide"
QVQLVQSGGGVVQPGRSLRLSCKASGYTFTRYTMHWVRQAPGKGLEWIGYINPSRGYTNYNQKVKDRFTISRDNSKNTAFLQMDSLRPEDTGVYFCARYYDDHYSLDYWGQGTPVTVSS

SEQ ID NO: 438 - protein, 14 aa, Artificial Sequence
  source: /note="Description of Artificial Sequence: Synthetic peptide"
GSSTGAVTSGNYPN

SEQ ID NO: 439 - protein, 7 aa, Artificial Sequence
  source: /note="Description of Artificial Sequence: Synthetic peptide"
GTKFLAP

SEQ ID NO: 440 - protein, 9 aa, Artificial Sequence
  source: /note="Description of Artificial Sequence: Synthetic peptide"
VLWYSNRWV

SEQ ID NO: 441 - protein, 10 aa, Artificial Sequence
  source: /note="Description of Artificial Sequence: Synthetic peptide"
STGAVTSGNY

SEQ ID NO: 442 - protein, 3 aa, Artificial Sequence
  source: /note="Description of Artificial Sequence: Synthetic peptide"
GTK

SEQ ID NO: 443 - protein, 6 aa, Artificial Sequence
  source: /note="Description of Artificial Sequence: Synthetic peptide"
WYSNRW

SEQ ID NO: 444 - protein, 9 aa, Artificial Sequence
  source: /note="Description of Artificial Sequence: Synthetic peptide"
TGAVTSGNY

SEQ ID NO: 445 - protein, 109 aa, Artificial Sequence
  source: /note="Description of Artificial Sequence: Synthetic polypeptide"
QTVVTQEPSLTVSPGGTVTLTCGSSTGAVTSGNYPNWVQQKPGQAPRGLIGGTKFLAPGTPARFSGSLLGGKAALTLSGVQPEDEAEYYCVLWYSNRWVFGGGTKLTVL

SEQ ID NO: 446 - protein, 109 aa, Artificial Sequence
  source: /note="Description of Artificial Sequence: Synthetic polypeptide"
QTVVTQEPSLTVSPGGTVTLTCGSSTGAVTSGNYPNWVQQKPGQAPRGLIGGTKFLAPGTPARFSGSLLGGKAALTLSGVQPEDEAEYYCVLWYSNRWVFGCGTKLTVL

SEQ ID NO: 447 - protein, 10 aa, Artificial Sequence
  source: /note="Description of Artificial Sequence: Synthetic peptide"
GFTFNKYAMN

SEQ ID NO: 448 - protein, 19 aa, Artificial Sequence
  source: /note="Description of Artificial Sequence: Synthetic peptide"
RIRSKYNNYATYYADSVKD

SEQ ID NO: 449 - protein, 14 aa, Artificial Sequence
  source: /note="Description of Artificial Sequence: Synthetic peptide"
HGNFGNSYISYWAY

SEQ ID NO: 450 - protein, 5 aa, Artificial Sequence
  source: /note="Description of Artificial Sequence: Synthetic peptide"
KYAMN

SEQ ID NO: 451 - protein, 7 aa, Artificial Sequence
  source: /note="Description of Artificial Sequence: Synthetic peptide"
GFTFNKY

SEQ ID NO: 452 - protein, 8 aa, Artificial Sequence
  source: /note="Description of Artificial Sequence: Synthetic peptide"
RSKYNNYA

SEQ ID NO: 453 - protein, 8 aa, Artificial Sequence
  source: /note="Description of Artificial Sequence: Synthetic peptide"
GFTFNKYA

SEQ ID NO: 454 - protein, 10 aa, Artificial Sequence
  source: /note="Description of Artificial Sequence: Synthetic peptide"
IRSKYNNYAT

SEQ ID NO: 455 - protein, 16 aa, Artificial Sequence
  source: /note="Description of Artificial Sequence: Synthetic peptide"
VRHGNFGNSYISYWAY

SEQ ID NO: 456 - protein, 125 aa, Artificial Sequence
  source: /note="Description of Artificial Sequence: Synthetic polypeptide"
EVQLVESGGGLVQPGGSLKLSCAASGFTFNKYAMNWVRQAPGKGLEWVARIRSKYNNYATYYADSVKDRFTISRDDSKNTAYLQMNNLKTEDTAVYYCVRHGNFGNSYISYWAYWGQGTLVTVSS

SEQ ID NO: 457 - protein, 125 aa, Artificial Sequence
  source: /note="Description of Artificial Sequence: Synthetic polypeptide"
EVQLVESGGGLVQPGGSLKLSCAASGFTFNKYAMNWVRQAPGKCLEWVARIRSKYNNYATYYADSVKDRFTISRDDSKNTAYLQMNNLKTEDTAVYYCVRHGNFGNSYISYWAYWGQGTLVTVSS

SEQ ID NO: 458 - protein, 14 aa, Artificial Sequence
  source: /note="Description of Artificial Sequence: Synthetic peptide"
RSSTGAVTTSNYAN

SEQ ID NO: 459 - protein, 7 aa, Artificial Sequence
  source: /note="Description of Artificial Sequence: Synthetic peptide"
GTNKRAP

SEQ ID NO: 460 - protein, 9 aa, Artificial Sequence
  source: /note="Description of Artificial Sequence: Synthetic peptide"
ALWYSNLWV

SEQ ID NO: 461 - protein, 10 aa, Artificial Sequence
  source: /note="Description of Artificial Sequence: Synthetic peptide"
STGAVTTSNY

SEQ ID NO: 462 - protein, 3 aa, Artificial Sequence
  source: /note="Description of Artificial Sequence: Synthetic peptide"
GTN

SEQ ID NO: 463 - protein, 6 aa, Artificial Sequence
  source: /note="Description of Artificial Sequence: Synthetic peptide"
WYSNLW

SEQ ID NO: 464 - protein, 9 aa, Artificial Sequence
  source: /note="Description of Artificial Sequence: Synthetic peptide"
TGAVTTSNY

SEQ ID NO: 465 - protein, 3 aa, Artificial Sequence
  source: /note="Description of Artificial Sequence: Synthetic peptide"
GGT

SEQ ID NO: 466 - protein, 7 aa, Artificial Sequence
  source: /note="Description of Artificial Sequence: Synthetic peptide"
ALWYSNL

SEQ ID NO: 467 - protein, 109 aa, Artificial Sequence
  source: /note="Description of Artificial Sequence: Synthetic polypeptide"
QAVVTQEPSLTVSPGGTVTLTCRSSTGAVTTSNYANWVQQKPGQAPRGLIGGTNKRAPWTPARFSGSLLGDKAALTLSGAQPEDEAEYFCALWYSNLWVFGGGTKLTVL

SEQ ID NO: 468 - protein, 109 aa, Artificial Sequence
  source: /note="Description of Artificial Sequence: Synthetic polypeptide"
QAVVTQEPSLTVSPGGTVTLTCRSSTGAVTTSNYANWVQQKPGQAPRGLIGGTNKRAPWTPARFSGSLLGDKAALTLSGAQPEDEAEYFCALWYSNLWVFGCGTKLTVL

SEQ ID NO: 469 - protein, 10 aa, Artificial Sequence
  source: /note="Description of Artificial Sequence: Synthetic peptide"
GFTFNTYAMN

SEQ ID NO: 470 - protein, 14 aa, Artificial Sequence
  source: /note="Description of Artificial Sequence: Synthetic peptide"
HGNFGNSYVSWFAY

SEQ ID NO: 471 - protein, 5 aa, Artificial Sequence
  source: /note="Description of Artificial Sequence: Synthetic peptide"
TYAMN

SEQ ID NO: 472 - protein, 7 aa, Artificial Sequence
  source: /note="Description of Artificial Sequence: Synthetic peptide"
GFTFNTY

SEQ ID NO: 473 - protein, 8 aa, Artificial Sequence
  source: /note="Description of Artificial Sequence: Synthetic peptide"
GFTFNTYA

SEQ ID NO: 474 - protein, 16 aa, Artificial Sequence
  source: /note="Description of Artificial Sequence: Synthetic peptide"
VRHGNFGNSYVSWFAY

SEQ ID NO: 475 - protein, 125 aa, Artificial Sequence
  source: /note="Description of Artificial Sequence: Synthetic polypeptide"
EVQLVESGGGLVQPGGSLKLSCAASGFTFNTYAMNWVRQASGKGLEWVGRIRSKYNNYATYYADSVKDRFTISRDDSKSTLYLQMNSLKTEDTAVYYCVRHGNFGNSYVSWFAYWGQGTLVTVSS

SEQ ID NO: 476 - protein, 125 aa, Artificial Sequence
  source: /note="Description of Artificial Sequence: Synthetic polypeptide"
EVQLVESGGGLVQPGGSLKLSCAASGFTFNTYAMNWVRQASGKCLEWVGRIRSKYNNYATYYADSVKDRFTISRDDSKSTLYLQMNSLKTEDTAVYYCVRHGNFGNSYVSWFAYWGQGTLVTVSS

SEQ ID NO: 477 - protein, 16 aa, Artificial Sequence
  source: /note="Description of Artificial Sequence: Synthetic peptide"
RSSQSLVRSEGTTYFN

SEQ ID NO: 478 - protein, 7 aa, Artificial Sequence
  source: /note="Description of Artificial Sequence: Synthetic peptide"
RVSNRFS

SEQ ID NO: 479 - protein, 9 aa, Artificial Sequence
  source: /note="Description of Artificial Sequence: Synthetic peptide"
LQSSHFPWT

SEQ ID NO: 480 - protein, 12 aa, Artificial Sequence
  source: /note="Description of Artificial Sequence: Synthetic peptide"
SQSLVRSEGTTY

SEQ ID NO: 481 - protein, 3 aa, Artificial Sequence
  source: /note="Description of Artificial Sequence: Synthetic peptide"
RVS

SEQ ID NO: 482 - protein, 6 aa, Artificial Sequence
  source: /note="Description of Artificial Sequence: Synthetic peptide"
SSHFPW

SEQ ID NO: 483 - protein, 11 aa, Artificial Sequence
  source: /note="Description of Artificial Sequence: Synthetic peptide"
QSLVRSEGTTY

SEQ ID NO: 484 - protein, 112 aa, Artificial Sequence
  source: /note="Description of Artificial Sequence: Synthetic polypeptide"
DILVTQTPVSLPVSLGGHVSISCRSSQSLVRSEGTTYFNWYLQKPGQSPQLLIYRVSNRFSGVPDRFSGSGSGTDFTLKISRVEPEDLGVYYCLQSSHFPWTFGGGTKLELK

SEQ ID NO: 485 - protein, 10 aa, Artificial Sequence
  source: /note="Description of Artificial Sequence: Synthetic peptide"
GFTFSKQGMH

SEQ ID NO: 486 - protein, 17 aa, Artificial Sequence
  source: /note="Description of Artificial Sequence: Synthetic peptide"
MIYYDSSKMYYADTVKG

SEQ ID NO: 487 - protein, 9 aa, Artificial Sequence
  source: /note="Description of Artificial Sequence: Synthetic peptide"
FWWDLDFDH

SEQ ID NO: 488 - protein, 5 aa, Artificial Sequence
  source: /note="Description of Artificial Sequence: Synthetic peptide"
KQGMH

SEQ ID NO: 489 - protein, 7 aa, Artificial Sequence
  source: /note="Description of Artificial Sequence: Synthetic peptide"
GFTFSKQ

SEQ ID NO: 490 - protein, 6 aa, Artificial Sequence
  source: /note="Description of Artificial Sequence: Synthetic peptide"
YYDSSK

SEQ ID NO: 491 - protein, 8 aa, Artificial Sequence
  source: /note="Description of Artificial Sequence: Synthetic peptide"
GFTFSKQG

SEQ ID NO: 492 - protein, 8 aa, Artificial Sequence
  source: /note="Description of Artificial Sequence: Synthetic peptide"
IYYDSSKM

SEQ ID NO: 493 - protein, 11 aa, Artificial Sequence
  source: /note="Description of Artificial Sequence: Synthetic peptide"
ASFWWDLDFDH

SEQ ID NO: 494 - protein, 118 aa, Artificial Sequence
  source: /note="Description of Artificial Sequence: Synthetic polypeptide"
EVKLVESGGDLVQPGDSLTLSCVASGFTFSKQGMHWIRQAPKKGLEWIAMIYYDSSKMYYADTVKGRFTISRDNSKNTLYLEMNSLRSEDTAMYYCASFWWDLDFDHWGQGVMVTVSS

SEQ ID NO: 495 - protein, 10 aa, Artificial Sequence
  source: /note="Description of Artificial Sequence: Synthetic peptide"
SATSSVSYMH

SEQ ID NO: 496 - protein, 9 aa, Artificial Sequence
  source: /note="Description of Artificial Sequence: Synthetic peptide"
QQWSSNPLT

SEQ ID NO: 497 - protein, 6 aa, Artificial Sequence
  source: /note="Description of Artificial Sequence: Synthetic peptide"
TSSVSY

SEQ ID NO: 498 - protein, 6 aa, Artificial Sequence
  source: /note="Description of Artificial Sequence: Synthetic peptide"
WSSNPL

SEQ ID NO: 499 - protein, 106 aa, Artificial Sequence
  source: /note="Description of Artificial Sequence: Synthetic polypeptide"
QIVLTQSPAIMSASPGEKVTMTCSATSSVSYMHWYQQKSGTSPKRWIYDTSKLASGVPARFSGSGSGTSYSLTISSMEAEDAATYYCQQWSSNPLTFGAGTKLELK

SEQ ID NO: 500 - protein, 10 aa, Artificial Sequence
  source: /note="Description of Artificial Sequence: Synthetic peptide"
GYKFTSYVMH

SEQ ID NO: 501 - protein, 17 aa, Artificial Sequence
  source: /note="Description of Artificial Sequence: Synthetic peptide"
YINPYNDVTKYNEKFKG

SEQ ID NO: 502 - protein, 11 aa, Artificial Sequence
  source: /note="Description of Artificial Sequence: Synthetic peptide"
GSYYDYDGFVY

SEQ ID NO: 503 - protein, 5 aa, Artificial Sequence
  source: /note="Description of Artificial Sequence: Synthetic peptide"
SYVMH

SEQ ID NO: 504 - protein, 7 aa, Artificial Sequence
  source: /note="Description of Artificial Sequence: Synthetic peptide"
GYKFTSY

SEQ ID NO: 505 - protein, 6 aa, Artificial Sequence
  source: /note="Description of Artificial Sequence: Synthetic peptide"
NPYNDV

SEQ ID NO: 506 - protein, 8 aa, Artificial Sequence
  source: /note="Description of Artificial Sequence: Synthetic peptide"
GYKFTSYV

SEQ ID NO: 507 - protein, 8 aa, Artificial Sequence
  source: /note="Description of Artificial Sequence: Synthetic peptide"
INPYNDVT

SEQ ID NO: 508 - protein, 13 aa, Artificial Sequence
  source: /note="Description of Artificial Sequence: Synthetic peptide"
ARGSYYDYDGFVY

SEQ ID NO: 509 - protein, 120 aa, Artificial Sequence
  source: /note="Description of Artificial Sequence: Synthetic polypeptide"
EVQLQQSGPELVKPGASVKMSCKASGYKFTSYVMHWVKQKPGQGLEWIGYINPYNDVTKYNEKFKGKATLTSDKSSSTAYMELSSLTSEDSAVHYCARGSYYDYDGFVYWGQGTLVTVSA

SEQ ID NO: 510 - protein, 11 aa, Artificial Sequence
  source: /note="Description of Artificial Sequence: Synthetic peptide"
HASQNIYVWLN

SEQ ID NO: 511 - protein, 7 aa, Artificial Sequence
  source: /note="Description of Artificial Sequence: Synthetic peptide"
KASNLHT

SEQ ID NO: 512 - protein, 9 aa, Artificial Sequence
  source: /note="Description of Artificial Sequence: Synthetic peptide"
QQGQTYPYT

SEQ ID NO: 513 - protein, 7 aa, Artificial Sequence
  source: /note="Description of Artificial Sequence: Synthetic peptide"
SQNIYVW

SEQ ID NO: 514 - protein, 3 aa, Artificial Sequence
  source: /note="Description of Artificial Sequence: Synthetic peptide"
KAS

SEQ ID NO: 515 - protein, 6 aa, Artificial Sequence
  source: /note="Description of Artificial Sequence: Synthetic peptide"
GQTYPY

SEQ ID NO: 516 - protein, 6 aa, Artificial Sequence
  source: /note="Description of Artificial Sequence: Synthetic peptide"
QNIYVW

SEQ ID NO: 517 - protein, 107 aa, Artificial Sequence
  source: /note="Description of Artificial Sequence: Synthetic polypeptide"
DIQMTQSPSSLSASVGDRVTITCHASQNIYVWLNWYQQKPGKAPKLLIYKASNLHTGVPSRFSGSGSGTDFTLTISSLQPEDFATYYCQQGQTYPYTFGGGTKVEIK

SEQ ID NO: 518 - protein, 214 aa, Artificial Sequence
  source: /note="Description of Artificial Sequence: Synthetic polypeptide"
DIQMTQSPSSLSASVGDRVTITCHASQNIYVWLNWYQQKPGKAPKLLIYKASNLHTGVPSRFSGSGSGTDFTLTISSLQPEDFATYYCQQGQTYPYTFGGGTKVEIKRTVAAPSVFIFPPSDEQLKSGTASVVCLLNNFYPREAKVQWKVDNALQSGNSQESVTEQDSKDSTYSLSSTLTLSKADYEKHKVYACEVTHQGLSSPVTKSFNRGEC

SEQ ID NO: 519 - protein, 10 aa, Artificial Sequence
  source: /note="Description of Artificial Sequence: Synthetic peptide"
GYTFTSYYIH

SEQ ID NO: 520 - protein, 17 aa, Artificial Sequence
  source: /note="Description of Artificial Sequence: Synthetic peptide"
CIYPGNVNTNYNEKFKD

SEQ ID NO: 521 - protein, 11 aa, Artificial Sequence
  source: /note="Description of Artificial Sequence: Synthetic peptide"
SHYGLDWNFDV

SEQ ID NO: 522 - protein, 5 aa, Artificial Sequence
  source: /note="Description of Artificial Sequence: Synthetic peptide"
SYYIH

SEQ ID NO: 523 - protein, 7 aa, Artificial Sequence
  source: /note="Description of Artificial Sequence: Synthetic peptide"
GYTFTSY

SEQ ID NO: 524 - protein, 6 aa, Artificial Sequence
  source: /note="Description of Artificial Sequence: Synthetic peptide"
YPGNVN

SEQ ID NO: 525 - protein, 8 aa, Artificial Sequence
  source: /note="Description of Artificial Sequence: Synthetic peptide"
GYTFTSYY

SEQ ID NO: 526 - protein, 8 aa, Artificial Sequence
  source: /note="Description of Artificial Sequence: Synthetic peptide"
IYPGNVNT

SEQ ID NO: 527 - protein, 13 aa, Artificial Sequence
  source: /note="Description of Artificial Sequence: Synthetic peptide"
TRSHYGLDWNFDV

SEQ ID NO: 528 - protein, 120 aa, Artificial Sequence
  source: /note="Description of Artificial Sequence: Synthetic polypeptide"
QVQLVQSGAEVKKPGASVKVSCKASGYTFTSYYIHWVRQAPGQGLEWIGCIYPGNVNTNYNEKFKDRATLTVDTSISTAYMELSRLRSDDTAVYFCTRSHYGLDWNFDVWGQGTTVTVSS

SEQ ID NO: 529 - protein, 223 aa, Artificial Sequence
  source: /note="Description of Artificial Sequence: Synthetic polypeptide"
QVQLVQSGAEVKKPGASVKVSCKASGYTFTSYYIHWVRQAPGQGLEWIGCIYPGNVNTNYNEKFKDRATLTVDTSISTAYMELSRLRSDDTAVYFCTRSHYGLDWNFDVWGQGTTVTVSSASTKGPSVFPLAPSSKSTSGGTAALGCLVKDYFPEPVTVSWNSGALTSGVHTFPAVLQSSGLYSLSSVVTVPSSSLGTQTYICNVNHKPSNTKVDKRVEPKSC

SEQ ID NO: 530 - protein, 13 aa, Artificial Sequence
  source: /note="Description of Artificial Sequence: Synthetic peptide"
SGSSSNIVSNYVN

SEQ ID NO: 531 - protein, 7 aa, Artificial Sequence
  source: /note="Description of Artificial Sequence: Synthetic peptide"
DNNKRPS

SEQ ID NO: 532 - protein, 11 aa, Artificial Sequence
  source: /note="Description of Artificial Sequence: Synthetic peptide"
QSYAIGSYSVV

SEQ ID NO: 533 - protein, 9 aa, Artificial Sequence
  source: /note="Description of Artificial Sequence: Synthetic peptide"
SSSNIVSNY

SEQ ID NO: 534 - protein, 3 aa, Artificial Sequence
  source: /note="Description of Artificial Sequence: Synthetic peptide"
DNN

SEQ ID NO: 535 - protein, 8 aa, Artificial Sequence
  source: /note="Description of Artificial Sequence: Synthetic peptide"
YAIGSYSV

SEQ ID NO: 536 - protein, 8 aa, Artificial Sequence
  source: /note="Description of Artificial Sequence: Synthetic peptide"
SSNIVSNY

SEQ ID NO: 537 - protein, 110 aa, Artificial Sequence
  source: /note="Description of Artificial Sequence: Synthetic polypeptide"
DIVLTQPPSVSGAPGQRVTISCSGSSSNIVSNYVNWYQQLPGTAPKLLIYDNNKRPSGVPDRFSGSKSGTSASLAITGLQSEDEADYYCQSYAIGSYSVVFGGGTKLTVL

SEQ ID NO: 538 - protein, 10 aa, Artificial Sequence
  source: /note="Description of Artificial Sequence: Synthetic peptide"
GFTFSTYGMS

SEQ ID NO: 539 - protein, 17 aa, Artificial Sequence
  source: /note="Description of Artificial Sequence: Synthetic peptide"
SIFYTGSSTYYADSVKG

SEQ ID NO: 540 - protein, 11 aa, Artificial Sequence
  source: /note="Description of Artificial Sequence: Synthetic peptide"
IGYAGDSKYAI

SEQ ID NO: 541 - protein, 5 aa, Artificial Sequence
  source: /note="Description of Artificial Sequence: Synthetic peptide"
TYGMS

SEQ ID NO: 542 - protein, 7 aa, Artificial Sequence
  source: /note="Description of Artificial Sequence: Synthetic peptide"
GFTFSTY

SEQ ID NO: 543 - protein, 6 aa, Artificial Sequence
  source: /note="Description of Artificial Sequence: Synthetic peptide"
FYTGSS

SEQ ID NO: 544 - protein, 8 aa, Artificial Sequence
  source: /note="Description of Artificial Sequence: Synthetic peptide"
GFTFSTYG

SEQ ID NO: 545 - protein, 8 aa, Artificial Sequence
  source: /note="Description of Artificial Sequence: Synthetic peptide"
IFYTGSST

SEQ ID NO: 546 - protein, 13 aa, Artificial Sequence
  source: /note="Description of Artificial Sequence: Synthetic peptide"
ARIGYAGDSKYAI

SEQ ID NO: 547 - protein, 120 aa, Artificial Sequence
  source: /note="Description of Artificial Sequence: Synthetic polypeptide"
QVQLVESGGGLVQPGGSLRLSCAASGFTFSTYGMSWVRQAPGKGLEWVSSIFYTGSSTYYADSVKGRFTISRDNSKNTLYLQMNSLRAEDTAVYYCARIGYAGDSKYAIWGQGTLVTVSS

SEQ ID NO: 548 - protein, 120 aa, Artificial Sequence
  source: /note="Description of Artificial Sequence: Synthetic polypeptide"
EVQLVESGGGLVQPGGSLRLSCAASGFTFSTYGMSWVRQAPGKGLEWVSSIFYTGSSTYYADSVKGRFTISRDNSKNTLYLQMNSLRAEDTAVYYCARIGYAGDSKYAIWGQGTLVTVSS

SEQ ID NO: 549 - protein, 15 aa, Artificial Sequence
  source: /note="Description of Artificial Sequence: Synthetic peptide"
KSSQSLLSGSFNYLT

SEQ ID NO: 550 - protein, 7 aa, Artificial Sequence
  source: /note="Description of Artificial Sequence: Synthetic peptide"
YASTRHT

SEQ ID NO: 551 - protein, 9 aa, Artificial Sequence
  source: /note="Description of Artificial Sequence: Synthetic peptide"
HHHYNAPPT

SEQ ID NO: 552 - protein, 11 aa, Artificial Sequence
  source: /note="Description of Artificial Sequence: Synthetic peptide"
SQSLLSGSFNY

SEQ ID NO: 553 - protein, 3 aa, Artificial Sequence
  source: /note="Description of Artificial Sequence: Synthetic peptide"
YAS

SEQ ID NO: 554 - protein, 6 aa, Artificial Sequence
  source: /note="Description of Artificial Sequence: Synthetic peptide"
HYNAPP

SEQ ID NO: 555 - protein, 10 aa, Artificial Sequence
  source: /note="Description of Artificial Sequence: Synthetic peptide"
QSLLSGSFNY

SEQ ID NO: 556 - protein, 111 aa, Artificial Sequence
  source: /note="Description of Artificial Sequence: Synthetic polypeptide"
DIVMTQSPDSLAVSLGERATINCKSSQSLLSGSFNYLTWYQQKPGQPPKLLIFYASTRHTGVPDRFSGSGSGTDFTLTISSLQAEDVAVYYCHHHYNAPPTFGPGTKVDIK

SEQ ID NO: 557 - protein, 218 aa, Artificial Sequence
  source: /note="Description of Artificial Sequence: Synthetic polypeptide"
DIVMTQSPDSLAVSLGERATINCKSSQSLLSGSFNYLTWYQQKPGQPPKLLIFYASTRHTGVPDRFSGSGSGTDFTLTISSLQAEDVAVYYCHHHYNAPPTFGPGTKVDIKRTVAAPSVFIFPPSDEQLKSGTASVVCLLNNFYPREAKVQWKVDNALQSGNSQESVTEQDSKDSTYSLSSTLTLSKADYEKHKVYACEVTHQGLSSPVTKSFNRGEC

SEQ ID NO: 558 - protein, 10 aa, Artificial Sequence
  source: /note="Description of Artificial Sequence: Synthetic peptide"
GFTFSDYWMD

SEQ ID NO: 559 - protein, 17 aa, Artificial Sequence
  source: /note="Description of Artificial Sequence: Synthetic peptide"
NIDEDGSITEYSPFVKG

SEQ ID NO: 560 - protein, 8 aa, Artificial Sequence
  source: /note="Description of Artificial Sequence: Synthetic peptide"
WGRFGFDS

SEQ ID NO: 561 - protein, 5 aa, Artificial Sequence
  source: /note="Description of Artificial Sequence: Synthetic peptide"
DYWMD

SEQ ID NO: 562 - protein, 7 aa, Artificial Sequence
  source: /note="Description of Artificial Sequence: Synthetic peptide"
GFTFSDY

SEQ ID NO: 563 - protein, 6 aa, Artificial Sequence
  source: /note="Description of Artificial Sequence: Synthetic peptide"
DEDGSI

SEQ ID NO: 564 - protein, 8 aa, Artificial Sequence
  source: /note="Description of Artificial Sequence: Synthetic peptide"
GFTFSDYW

SEQ ID NO: 565 - protein, 8 aa, Artificial Sequence
  source: /note="Description of Artificial Sequence: Synthetic peptide"
IDEDGSIT

SEQ ID NO: 566 - protein, 10 aa, Artificial Sequence
  source: /note="Description of Artificial Sequence: Synthetic peptide"
TRWGRFGFDS

SEQ ID NO: 567 - protein, 117 aa, Artificial Sequence
  source: /note="Description of Artificial Sequence: Synthetic polypeptide"
EVQLVESGGGLVQPGGSLRLSCAASGFTFSDYWMDWVRQAPGKGLVWVSNIDEDGSITEYSPFVKGRFTISRDNAKNTLYLQMNSLRAEDTAVYYCTRWGRFGFDSWGQGTLVTVSS

SEQ ID NO: 568 - protein, 11 aa, Artificial Sequence
  source: /note="Description of Artificial Sequence: Synthetic peptide"
RASQGISRWLA

SEQ ID NO: 569 - protein, 9 aa, Artificial Sequence
  source: /note="Description of Artificial Sequence: Synthetic peptide"
QQYNTYPRT

SEQ ID NO: 570 - protein, 7 aa, Artificial Sequence
  source: /note="Description of Artificial Sequence: Synthetic peptide"
SQGISRW

SEQ ID NO: 571 - protein, 6 aa, Artificial Sequence
  source: /note="Description of Artificial Sequence: Synthetic peptide"
YNTYPR

SEQ ID NO: 572 - protein, 6 aa, Artificial Sequence
  source: /note="Description of Artificial Sequence: Synthetic peptide"
QGISRW

SEQ ID NO: 573 - protein, 107 aa, Artificial Sequence
  source: /note="Description of Artificial Sequence: Synthetic polypeptide"
DIQMTQSPSSLSASVGDRVTITCRASQGISRWLAWYQQKPEKAPKSLIYAASSLQSGVPSRFSGSGSGTDFTLTISSLQPEDFATYYCQQYNTYPRTFGQGTKVEIK

SEQ ID NO: 574 - protein, 10 aa, Artificial Sequence
  source: /note="Description of Artificial Sequence: Synthetic peptide"
GFTFSSYDMH

SEQ ID NO: 575 - protein, 17 aa, Artificial Sequence
  source: /note="Description of Artificial Sequence: Synthetic peptide"
VIWYDGSNKYYADSVKG

SEQ ID NO: 576 - protein, 10 aa, Artificial Sequence
  source: /note="Description of Artificial Sequence: Synthetic peptide"
GSGNWGFFDY

SEQ ID NO: 577 - protein, 5 aa, Artificial Sequence
  source: /note="Description of Artificial Sequence: Synthetic peptide"
SYDMH

SEQ ID NO: 578 - protein, 6 aa, Artificial Sequence
  source: /note="Description of Artificial Sequence: Synthetic peptide"
WYDGSN

SEQ ID NO: 579 - protein, 8 aa, Artificial Sequence
  source: /note="Description of Artificial Sequence: Synthetic peptide"
GFTFSSYD

SEQ ID NO: 580 - protein, 8 aa, Artificial Sequence
  source: /note="Description of Artificial Sequence: Synthetic peptide"
IWYDGSNK

SEQ ID NO: 581 - protein, 12 aa, Artificial Sequence
  source: /note="Description of Artificial Sequence: Synthetic peptide"
ARGSGNWGFFDY

SEQ ID NO: 582 - protein, 118 aa, Artificial Sequence
  source: /note="Description of Artificial Sequence: Synthetic polypeptide"
QVQLVESGGGVVQPGRSLRLSCAASGFTFSSYDMHWVRQAPGGLEWVAVIWYDGSNKYYADSVKGRFTISRDNSKNTLYLQMNSLRAEDTAVYYCARGSGNWGFFDYWGQGTLVTVSS

SEQ ID NO: 583 - protein, 10 aa, Artificial Sequence
  source: /note="Description of Artificial Sequence: Synthetic peptide"
SASSSRSYMQ

SEQ ID NO: 584 - protein, 7 aa, Artificial Sequence
  source: /note="Description of Artificial Sequence: Synthetic peptide"
HQRSSYT

SEQ ID NO: 585 - protein, 6 aa, Artificial Sequence
  source: /note="Description of Artificial Sequence: Synthetic peptide"
SSSRSY

SEQ ID NO: 586 - protein, 4 aa, Artificial Sequence
  source: /note="Description of Artificial Sequence: Synthetic peptide"
RSSY

SEQ ID NO: 587 - protein, 5 aa, Artificial Sequence
  source: /note="Description of Artificial Sequence: Synthetic peptide"
SSRSY

SEQ ID NO: 588 - protein, 104 aa, Artificial Sequence [sequence omitted]

SEQ ID NO: 589 - protein, 10 aa, Artificial Sequence
  source: /note="Description of Artificial Sequence: Synthetic peptide"
GYSFTRYWMH

SEQ ID NO: 590 - protein, 17 aa, Artificial Sequence
  source: /note="Description of Artificial Sequence: Synthetic peptide"
AIYPGNSDTSYNQKFEG

SEQ ID NO: 591 - protein, 8 aa, Artificial Sequence
  source: /note="Description of Artificial Sequence: Synthetic peptide"
DYGYYFDF

SEQ ID NO: 592 - protein, 5 aa, Artificial Sequence
  source: /note="Description of Artificial Sequence: Synthetic peptide"
RYWMH

SEQ ID NO: 593 - protein, 7 aa, Artificial Sequence
  source: /note="Description of Artificial Sequence: Synthetic peptide"
GYSFTRY

SEQ ID NO: 594 - protein, 6 aa, Artificial Sequence
  source: /note="Description of Artificial Sequence: Synthetic peptide"
YPGNSD

SEQ ID NO: 595 - protein, 8 aa, Artificial Sequence
  source: /note="Description of Artificial Sequence: Synthetic peptide"
GYSFTRYW

SEQ ID NO: 596 - protein, 8 aa, Artificial Sequence
  source: /note="Description of Artificial Sequence: Synthetic peptide"
IYPGNSDT

SEQ ID NO: 597 - protein, 10 aa, Artificial Sequence
  source: /note="Description of Artificial Sequence: Synthetic peptide"
SRDYGYYFDF

SEQ ID NO: 598 - protein, 117 aa, Artificial Sequence
  source: /note="Description of Artificial Sequence: Synthetic polypeptide"
EVQLQQSGTVLARPGASVKMSCKASGYSFTRYWMHWIKQRPGQGLEWIGAIYPGNSDTSYNQKFEGKAKLTAVTSASTAYMELSSLTHEDSAVYYCSRDYGYYFDFWGQGTTLTVSS

SEQ ID NO: 599 - protein, 15 aa, Artificial Sequence
  source: /note="Description of Artificial Sequence: Synthetic peptide"
KASQSVDYDGDSYMN

SEQ ID NO: 600 - protein, 7 aa, Artificial Sequence
  source: /note="Description of Artificial Sequence: Synthetic peptide"
AASNLES

SEQ ID NO: 601 - protein, 9 aa, Artificial Sequence
  source: /note="Description of Artificial Sequence: Synthetic peptide"
QQSNEDPYT

SEQ ID NO: 602 - protein, 11 aa, Artificial Sequence
  source: /note="Description of Artificial Sequence: Synthetic peptide"
SQSVDYDGDSY

SEQ ID NO: 603 - protein, 6 aa, Artificial Sequence
  source: /note="Description of Artificial Sequence: Synthetic peptide"
SNEDPY

SEQ ID NO: 604 - protein, 10 aa, Artificial Sequence
  source: /note="Description of Artificial Sequence: Synthetic peptide"
QSVDYDGDSY

SEQ ID NO: 605 - protein, 111 aa, Artificial Sequence
  source: /note="Description of Artificial Sequence: Synthetic polypeptide"
DIVLTQSPLSLPVTLGQPASISCKASQSVDYDGDSYMNWYQQRPGQSPRLLIYAASNLESGVPDRFSGSGSGTDFTLKISRVEAEDVGVYYCQQSNEDPYTFGGGTKVEIK

SEQ ID NO: 606 - protein, 218 aa, Artificial Sequence
  source: /note="Description of Artificial Sequence: Synthetic polypeptide"
DIVLTQSPLSLPVTLGQPASISCKASQSVDYDGDSYMNWYQQRPGQSPRLLIYAASNLESGVPDRFSGSGSGTDFTLKISRVEAEDVGVYYCQQSNEDPYTFGGGTKVEIKRTVAAPSVFIFPPSDEQLKSGTASVVCLLNNFYPREAKVQWKVDNALQSGNSQESVTEQDSKDSTYSLSSTLTLSKADYEKHKVYACEVTHQGLSSPVTKSFNRGEC

SEQ ID NO: 607 - protein, 10 aa, Artificial Sequence
  source: /note="Description of Artificial Sequence: Synthetic peptide"
GYAFTNYLIE

SEQ ID NO: 608 - protein, 17 aa, Artificial Sequence
  source: /note="Description of Artificial Sequence: Synthetic peptide"
VINPGSGGTNYNEKFKG

SEQ ID NO: 609 - protein, 12 aa, Artificial Sequence
  source: /note="Description of Artificial Sequence: Synthetic peptide"
WRGDGYYAYFDV

SEQ ID NO: 610 - protein, 5 aa, Artificial Sequence
  source: /note="Description of Artificial Sequence: Synthetic peptide"
NYLIE

SEQ ID NO: 611 - protein, 7 aa, Artificial Sequence
  source: /note="Description of Artificial Sequence: Synthetic peptide"
GYAFTNY

SEQ ID NO: 612 - protein, 6 aa, Artificial Sequence
  source: /note="Description of Artificial Sequence: Synthetic peptide"
NPGSGG

SEQ ID NO: 613 - protein, 8 aa, Artificial Sequence
  source: /note="Description of Artificial Sequence: Synthetic peptide"
GYAFTNYL

SEQ ID NO: 614 - protein, 8 aa, Artificial Sequence
  source: /note="Description of Artificial Sequence: Synthetic peptide"
INPGSGGT

SEQ ID NO: 615 - protein, 14 aa, Artificial Sequence
  source: /note="Description of Artificial Sequence: Synthetic peptide"
ARWRGDGYYAYFDV

SEQ ID NO: 616 - protein, 121 aa, Artificial Sequence
  source: /note="Description of Artificial Sequence: Synthetic polypeptide"
EVQLVQSGAEVKKPGESLKISCKGSGYAFTNYLIEWVRQMPGKGLEWMGVINPGSGGTNYNEKFKGQVTISADKSISTAYLQWSSLKASDTAMYYCARWRGDGYYAYFDVWGQGTTVTVSS

SEQ ID NO: 617 - protein, 224 aa, Artificial Sequence
  source: /note="Description of Artificial Sequence: Synthetic polypeptide"
EVQLVQSGAEVKKPGESLKISCKGSGYAFTNYLIEWVRQMPGKGLEWMGVINPGSGGTNYNEKFKGQVTISADKSISTAYLQWSSLKASDTAMYYCARWRGDGYYAYFDVWGQGTTVTVSSASTKGPSVFPLAPSSKSTSGGTAALGCLVKDYFPEPVTVSWNSGALTSGVHTFPAVLQSSGLYSLSSVVTVPSSSLGTQTYICNVNHKPSNTKVDKRVEPKSC

SEQ ID NO: 618 - protein, 11 aa, Artificial Sequence
  source: /note="Description of Artificial Sequence: Synthetic peptide"
RASQSVSSYLA

SEQ ID NO: 619 - protein, 7 aa, Artificial Sequence
  source: /note="Description of Artificial Sequence: Synthetic peptide"
DASNRAT

SEQ ID NO: 620 - protein, 11 aa, Artificial Sequence
  source: /note="Description of Artificial Sequence: Synthetic peptide"
QQRSNWPPALT

SEQ ID NO: 621 - protein, 7 aa, Artificial Sequence
  source: /note="Description of Artificial Sequence: Synthetic peptide"
SQSVSSY

SEQ ID NO: 622 - protein, 3 aa, Artificial Sequence
  source: /note="Description of Artificial Sequence: Synthetic peptide"
DAS

SEQ ID NO: 623 - protein, 8 aa, Artificial Sequence
  source: /note="Description of Artificial Sequence: Synthetic peptide"
RSNWPPAL

SEQ ID NO: 624 - protein, 6 aa, Artificial Sequence
  source: /note="Description of Artificial Sequence: Synthetic peptide"
QSVSSY

SEQ ID NO: 625 - protein, 109 aa, Artificial Sequence
  source: /note="Description of Artificial Sequence: Synthetic polypeptide"
EIVLTQSPATLSLSPGERATLSCRASQSVSSYLAWYQQKPGQAPRLLIYDASNRATGIPARFSGSGSGTDFTLTISSLEPEDFAVYYCQQRSNWPPALTFCGGTKVEIK

SEQ ID NO: 626 - protein, 10 aa, Artificial Sequence
  source: /note="Description of Artificial Sequence: Synthetic peptide"
GGSFSGYYWS

SEQ ID NO: 627 - protein, 16 aa, Artificial Sequence
  source: /note="Description of Artificial Sequence: Synthetic peptide"
EINHGGYVTYNPSLES

SEQ ID NO: 628 - protein, 13 aa, Artificial Sequence
  source: /note="Description of Artificial Sequence: Synthetic peptide"
DYGPGNYDWYFDL

SEQ ID NO: 629 - protein, 5 aa, Artificial Sequence
  source: /note="Description of Artificial Sequence: Synthetic peptide"
GYYWS

SEQ ID NO: 630 - protein, 7 aa, Artificial Sequence
  source: /note="Description of Artificial Sequence: Synthetic peptide"
GGSFSGY

SEQ ID NO: 631 - protein, 5 aa, Artificial Sequence
  source: /note="Description of Artificial Sequence: Synthetic peptide"
NHGGY

SEQ ID NO: 632 - protein, 8 aa, Artificial Sequence
  source: /note="Description of Artificial Sequence: Synthetic peptide"
GGSFSGYY

SEQ ID NO: 633 - protein, 7 aa, Artificial Sequence
  source: /note="Description of Artificial Sequence: Synthetic peptide"
INHGGYV

SEQ ID NO: 634 - protein, 15 aa, Artificial Sequence
  source: /note="Description of Artificial Sequence: Synthetic peptide"
ARDYGPGNYDWYFDL

SEQ ID NO: 635 - protein, 121 aa, Artificial Sequence [sequence omitted]

SEQ ID NO: 636 - protein, 11 aa, Artificial Sequence
  source: /note="Description of Artificial Sequence: Synthetic peptide"
RASQDISSYLN

SEQ ID NO: 637 - protein, 7 aa, Artificial Sequence
  source: /note="Description of Artificial Sequence: Synthetic peptide"
YTSRLHS

SEQ ID NO: 638 - protein, 7 aa, Artificial Sequence
  source: /note="Description of Artificial Sequence: Synthetic peptide"
SQDISSY

SEQ ID NO: 639 - protein, 3 aa, Artificial Sequence
  source: /note="Description of Artificial Sequence: Synthetic peptide"
YTS

SEQ ID NO: 640 - protein, 6 aa, Artificial Sequence
  source: /note="Description of Artificial Sequence: Synthetic peptide"
GNTLPY

SEQ ID NO: 641 - protein, 6 aa, Artificial Sequence
  source: /note="Description of Artificial Sequence: Synthetic peptide"
QDISSY

SEQ ID NO: 642 - protein, 107 aa, Artificial Sequence [sequence omitted]

SEQ ID NO: 643 - protein, 11 aa, Artificial Sequence
  source: /note="Description of Artificial Sequence: Synthetic peptide"
GYSITSDHAWS

SEQ ID NO: 644 - protein, 16 aa, Artificial Sequence
  source: /note="Description of Artificial Sequence: Synthetic peptide"
YISYSGITTYNPSLKS

SEQ ID NO: 645 - protein, 10 aa, Artificial Sequence
  source: /note="Description of Artificial Sequence: Synthetic peptide"
SLARTTAMDY

SEQ ID NO: 646 - protein, 6 aa, Artificial Sequence
  source: /note="Description of Artificial Sequence: Synthetic peptide"
SDHAWS

SEQ ID NO: 647 - protein, 8 aa, Artificial Sequence
  source: /note="Description of Artificial Sequence: Synthetic peptide"
GYSITSDH

SEQ ID NO: 648 - protein, 5 aa, Artificial Sequence
  source: /note="Description of Artificial Sequence: Synthetic peptide"
SYSGI

SEQ ID NO: 649 - protein, 9 aa, Artificial Sequence
  source: /note="Description of Artificial Sequence: Synthetic peptide"
GYSITSDHA

SEQ ID NO: 650 - protein, 7 aa, Artificial Sequence
  source: /note="Description of Artificial Sequence: Synthetic peptide"
ISYSGIT

SEQ ID NO: 651 - protein, 12 aa, Artificial Sequence
  source: /note="Description of Artificial Sequence: Synthetic peptide"
ARSLARTTAMDY

SEQ ID NO: 652 - protein, 119 aa, Artificial Sequence [sequence omitted]

SEQ ID NO: 653 - protein, 10 aa, Artificial Sequence
  source: /note="Description of Artificial Sequence: Synthetic peptide"
QQSYSTPPIT

SEQ ID NO: 654 - protein, 7 aa, Artificial Sequence
  source: /note="Description of Artificial Sequence: Synthetic peptide"
SYSTPPI

SEQ ID NO: 655 - protein, 108 aa, Artificial Sequence
  source: /note="Description of Artificial Sequence: Synthetic polypeptide"
DIQMTQSPSSLSASVGDRVTITCRASQSISSYLNWYQQKPGKAPKLLIYAASSLQSGVPSRFSGSGSGTDFTLTISSLQPEDFATYYCQQSYSTPPITFGQGTRLEIK

SEQ ID NO: 656 - protein, 10 aa, Artificial Sequence
  source: /note="Description of Artificial Sequence: Synthetic peptide"
GFTFSDYYMT

SEQ ID NO: 657 - protein, 17 aa, Artificial Sequence
  source: /note="Description of Artificial Sequence: Synthetic peptide"
YISSSGTNKYNADSVKG

SEQ ID NO: 658 - protein, 8 aa, Artificial Sequence
  source: /note="Description of Artificial Sequence: Synthetic peptide"
DPPWGMDV

SEQ ID NO: 659 - protein, 5 aa, Artificial Sequence
  source: /note="Description of Artificial Sequence: Synthetic peptide"
DYYMT

SEQ ID NO: 660 - protein, 6 aa, Artificial Sequence
  source: /note="Description of Artificial Sequence: Synthetic peptide"
SSSGTN

SEQ ID NO: 661 - protein, 8 aa, Artificial Sequence
  source: /note="Description of Artificial Sequence: Synthetic peptide"
GFTFSDYY

SEQ ID NO: 662 - protein, 8 aa, Artificial Sequence
  source: /note="Description of Artificial Sequence: Synthetic peptide"
ISSSGTNK

SEQ ID NO: 663 - protein, 10 aa, Artificial Sequence
  source: /note="Description of Artificial Sequence: Synthetic peptide"
VRDPPWGMDV

SEQ ID NO: 664 - protein, 117 aa, Artificial Sequence
  source: /note="Description of Artificial Sequence: Synthetic polypeptide"
QVQLVESGGGLVKPGGSLRLSCAASGFTFSDYYMTWIRQTPGKGLDWVSYISSSGTNKYNADSVKGRFTISRDNAKNSLYLQMNSLRAEDTAVYYCVRDPPWGMDVWGQGTTVTVSS

SEQ ID NO: 665 - protein, 16 aa, Artificial Sequence
  source: /note="Description of Artificial Sequence: Synthetic peptide"
RSSQSLLHSSGNTYLN

SEQ ID NO: 666 - protein, 7 aa, Artificial Sequence
  source: /note="Description of Artificial Sequence: Synthetic peptide"
LVSKLES

SEQ ID NO: 667 - protein, 9 aa, Artificial Sequence
  source: /note="Description of Artificial Sequence: Synthetic peptide"
MQFTHYPYT

SEQ ID NO: 668 - protein, 12 aa, Artificial Sequence
  source: /note="Description of Artificial Sequence: Synthetic peptide"
SQSLLHSSGNTY

SEQ ID NO: 669 - protein, 3 aa, Artificial Sequence
  source: /note="Description of Artificial Sequence: Synthetic peptide"
LVS

SEQ ID NO: 670 - protein, 6 aa, Artificial Sequence
  source: /note="Description of Artificial Sequence: Synthetic peptide"
FTHYPY

SEQ ID NO: 671 - protein, 11 aa, Artificial Sequence
  source: /note="Description of Artificial Sequence: Synthetic peptide"
QSLLHSSGNTY

SEQ ID NO: 672 - protein, 112 aa, Artificial Sequence
  source: /note="Description of Artificial Sequence: Synthetic polypeptide"
DVVMTQSPPSLLVTLGQPASISCRSSQSLLHSSGNTYLNWLLQRPGQSPQPLIYLVSKLESGVPDRFSGSGSGTDFTLKISGVEAEDVGVYYCMQFTHYPYTFGQGTKLEIK

SEQ ID NO: 673 - protein, 219 aa, Artificial Sequence
  source: /note="Description of Artificial Sequence: Synthetic polypeptide"
DVVMTQSPPSLLVTLGQPASISCRSSQSLLHSSGNTYLNWLLQRPGQSPQPLIYLVSKLESGVPDRFSGSGSGTDFTLKISGVEAEDVGVYYCMQFTHYPYTFGQGTKLEIKRTVAAPSVFIFPPSDEQLKSGTASVVCLLNNFYPREAKVQWKVDNALQSGNSQESVTEQDSKDSTYSLSSTLTLSKADYEKHKVYACEVTHQGLSSPVTKSFNRGEC

SEQ ID NO: 674 - protein, 10 aa, Artificial Sequence
  source: /note="Description of Artificial Sequence: Synthetic peptide"
GYIFTEYYMY

SEQ ID NO: 675 - protein, 17 aa, Artificial Sequence
  source: /note="Description of Artificial Sequence: Synthetic peptide"
RIDPEDGSIDYVEKFKK

SEQ ID NO: 676 - protein, 9 aa, Artificial Sequence
  source: /note="Description of Artificial Sequence: Synthetic peptide"
GKFNYRFAY

SEQ ID NO: 677 - protein, 5 aa, Artificial Sequence
  source: /note="Description of Artificial Sequence: Synthetic peptide"
EYYMY

SEQ ID NO: 678 - protein, 7 aa, Artificial Sequence
  source: /note="Description of Artificial Sequence: Synthetic peptide"
GYIFTEY

SEQ ID NO: 679 - protein, 6 aa, Artificial Sequence
  source: /note="Description of Artificial Sequence: Synthetic peptide"
DPEDGS

SEQ ID NO: 680 - protein, 8 aa, Artificial Sequence
  source: /note="Description of Artificial Sequence: Synthetic peptide"
GYIFTEYY

SEQ ID NO: 681 - protein, 8 aa, Artificial Sequence
  source: /note="Description of Artificial Sequence: Synthetic peptide"
IDPEDGSI

SEQ ID NO: 682 - protein, 11 aa, Artificial Sequence
  source: /note="Description of Artificial Sequence: Synthetic peptide"
ARGKFNYRFAY

SEQ ID NO: 683 - protein, 118 aa, Artificial Sequence
  source: /note="Description of Artificial Sequence: Synthetic polypeptide"
QVQLVQSGAEVQRPGASVKVSCKASGYIFTEYYMYWVRQAPGQGLELVGRIDPEDGSIDYVEKFKKKVTLTADTSSSTAYMELSSLTSDDTAVYYCARGKFNYRFAYWGQGTLVTVSS

SEQ ID NO: 684 - protein, 221 aa, Artificial Sequence
  source: /note="Description of Artificial Sequence: Synthetic polypeptide"
QVQLVQSGAEVQRPGASVKVSCKASGYIFTEYYMYWVRQAPGQGLELVGRIDPEDGSIDYVEKFKKKVTLTADTSSSTAYMELSSLTSDDTAVYYCARGKFNYRFAYWGQGTLVTVSSASTKGPSVFPLAPSSKSTSGGTAALGCLVKDYFPEPVTVSWNSGALTSGVHTFPAVLQSSGLYSLSSVVTVPSSSLGTQTYICNVNHKPSNTKVDKKVEPKSC

SEQ ID NO: 685-700 - skipped (16 entries)

SEQ ID NO: 701 - protein, 227 aa, Artificial Sequence
  source: /note="Description of Artificial Sequence: Synthetic polypeptide"
DKTHTCPPCPAPELLGGPSVFLFPPKPKDTLMISRTPEVTCVVVDVSHEDPEVKFNWYVDGVEVHNAKTKPREEQYNSTYRVVSVLTVLHQDWLNGKEYKCKVSNKALPAPIEKTISKAKGQPREPQVYTLPPSREEMTKNQVSLTCLVKGFYPSDIAVEWESNGQPENNYKTTPPVLDSDGSFFLYSKLTVDKSRWQQGNVFSCSVMHEALHNHYTQKSLSLSPGK

SEQ ID NO: 702 - protein, 227 aa, Artificial Sequence
  source: /note="Description of Artificial Sequence: Synthetic polypeptide"
DKTHTCPPCPAPELLGGPSVFLFPPKPKDTLMISRTPEVTCVVVAVSHEDPEVKFNWYVDGVEVHNAKTKPREEQYASTYRVVSVLTVLHQDWLNGKEYKCKVSNKALAAPIEKTISKAKGQPREPQVYTLPPSREEMTKNQVSLTCLVKGFYPSDIAVEWESNGQPENNYKTTPPVLDSDGSFFLYSKLTVDKSRWQQGNVFSCSVMHEALHNHYTQKSLSLSPGK

SEQ ID NO: 703 - protein, 711 aa, Artificial Sequence
  source: /note="Description of Artificial Sequence: Synthetic polypeptide"
QVQLVQSGAEVQRPGASVKVSCKASGYIFTEYYMYWVRQAPGQGLELVGRIDPEDGSIDYVEKFKKKVTLTADTSSSTAYMELSSLTSDDTAVYYCARGKFNYRFAYWGQGTLVTVSSASTKGPSVFPLAPSSKSTSGGTAALGCLVKDYFPEPVTVSWNSGALTSGVHTFPAVLQSSGLYSLSSVVTVPSSSLGTQTYICNVNHKPSNTKVDKRVEPKSCDKTHTCPPCPAPELLGGPSVFLFPPKPKDTLMISRTPEVTCVVVAVSHEDPEVKFNWYVDGVEVHNAKTKPREEQYASTYRVVSVLTVLHQDWLNGKEYKCKVSNKALAAPIEKTISKAKGQPREPQVYTLPPSREEMTKNQVSLTCLVKGFYPSDIAVEWESNGQPENNYKTTPPVLDSDGSFFLYSKLTVDKSRWQQGNVFSCSVMHEALHNHYTQKSLSLSPGGGGSGGGGSGGGGSGGGGSQVQLVQSGGGVVQPGRSLRLSCKASGYTFTRYTMHWVRQAPGKGLEWIGYINPSRGYTNYNQKVKDRFTISRDNSKNTAFLQMDSLRPEDTGVYFCARYYDDHYSLDYWGQGTPVTVSSGGGGSGGGGSGGGGSGGGGSDIQMTQSPSSLSASVGDRVTITCSASSSVSYMNWYQQTPGKAPKRWIYDTSKLASGVPSRFSGSGSGTDYTFTISSLQPEDIATYYCQQWSSNPFTFGQGTKLQIT

SEQ ID NO: 704 - protein, 713 aa, Artificial Sequence
  source: /note="Description of Artificial Sequence: Synthetic polypeptide"
QVQLVQSGAEVKKPGASVKVSCKASGYTFTSYYIHWVRQAPGQGLEWIGCIYPGNVNTNYNEKFKDRATLTVDTSISTAYMELSRLRSDDTAVYFCTRSHYGLDWNFDVWGQGTTVTVSSASTKGPSVFPLAPSSKSTSGGTAALGCLVKDYFPEPVTVSWNSGALTSGVHTFPAVLQSSGLYSLSSVVTVPSSSLGTQTYICNVNHKPSNTKVDKRVEPKSCDKTHTCPPCPAPELLGGPSVFLFPPKPKDTLMISRTPEVTCVVVAVSHEDPEVKFNWYVDGVEVHNAKTKPREEQYASTYRVVSVLTVLHQDWLNGKEYKCKVSNKALAAPIEKTISKAKGQPREPQVYTLPPSREEMTKNQVSLTCLVKGFYPSDIAVEWESNGQPENNYKTTPPVLDSDGSFFLYSKLTVDKSRWQQGNVFSCSVMHEALHNHYTQKSLSLSPGGGGSGGGGSGGGGSGGGGSQVQLVQSGGGVVQPGRSLRLSCKASGYTFTRYTMHWVRQAPGKGLEWIGYINPSRGYTNYNQKVKDRFTISRDNSKNTAFLQMDSLRPEDTGVYFCARYYDDHYSLDYWGQGTPVTVSSGGGGSGGGGSGGGGSGGGGSDIQMTQSPSSLSASVGDRVTITCSASSSVSYMNWYQQTPGKAPKRWIYDTSKLASGVPSRFSGSGSGTDYTFTISSLQPEDIATYYCQQWSSNPFTFGQGTKLQIT

SEQ ID NO: 705 - protein, 226 aa, Artificial Sequence
  source: /note="Description of Artificial Sequence: Synthetic polypeptide"
DIVLTQPPSVSGAPGQRVTISCSGSSSNIVSNYVNWYQQLPGTAPKLLIYDNNKRPSGVPDRFSGSKSGTSASLAITGLQSEDEADYYCQSYAIGSYSVVFGGGTKLTVLGQGTKVEIKRTVAAPSVFIFPPSDEQLKSGTASVVCLLNNFYPREAKVQWKVDNALQSGNSQESVTEQDSKDSTYSLSSTLTLSKADYEKHKVYACEVTHQGLSSPVTKSFNRGEC

SEQ ID NO: 706 - protein, 713 aa, Artificial Sequence
  source: /note="Description of Artificial Sequence: Synthetic polypeptide"
QVQLVESGGGLVQPGGSLRLSCAASGFTFSTYGMSWVRQAPGKGLEWVSSIFYTGSSTYYADSVKGRFTISRDNSKNTLYLQMNSLRAEDTAVYYCARIGYAGDSKYAIWGQGTLVTVSSASTKGPSVFPLAPSSKSTSGGTAALGCLVKDYFPEPVTVSWNSGALTSGVHTFPAVLQSSGLYSLSSVVTVPSSSLGTQTYICNVNHKPSNTKVDKRVEPKSCDKTHTCPPCPAPELLGGPSVFLFPPKPKDTLMISRTPEVTCVVVAVSHEDPEVKFNWYVDGVEVHNAKTKPREEQYASTYRVVSVLTVLHQDWLNGKEYKCKVSNKALAAPIEKTISKAKGQPREPQVYTLPPSREEMTKNQVSLTCLVKGFYPSDIAVEWESNGQPENNYKTTPPVLDSDGSFFLYSKLTVDKSRWQQGNVFSCSVMHEALHNHYTQKSLSLSPGGGGSGGGGSGGGGSGGGGSQVQLVQSGGGVVQPGRSLRLSCKASGYTFTRYTMHWVRQAPGKGLEWIGYINPSRGYTNYNQKVKDRFTISRDNSKNTAFLQMDSLRPEDTGVYFCARYYDDHYSLDYWGQGTPVTVSSGGGGSGGGGSGGGGSGGGGSDIQMTQSPSSLSASVGDRVTITCSASSSVSYMNWYQQTPGKAPKRWIYDTSKLASGVPSRFSGSGSGTDYTFTISSLQPEDIATYYCQQWSSNPFTFGQGTKLQIT

SEQ ID NO: 707 - protein, 720 aa, Artificial Sequence
  source: /note="Description of Artificial Sequence: Synthetic polypeptide"
QVQLVQSGAEVQRPGASVKVSCKASGYIFTEYYMYWVRQAPGQGLELVGRIDPEDGSIDYVEKFKKKVTLTADTSSSTAYMELSSLTSDDTAVYYCARGKFNYRFAYWGQGTLVTVSSASTKGPSVFPLAPSSKSTSGGTAALGCLVKDYFPEPVTVSWNSGALTSGVHTFPAVLQSSGLYSLSSVVTVPSSSLGTQTYICNVNHKPSNTKVDKRVEPKSCDKTHTCPPCPAPELLGGPSVFLFPPKPKDTLMISRTPEVTCVVVAVSHEDPEVKFNWYVDGVEVHNAKTKPREEQYASTYRVVSVLTVLHQDWLNGKEYKCKVSNKALAAPIEKTISKAKGQPREPQVYTLPPSREEMTKNQVSLTCLVKGFYPSDIAVEWESNGQPENNYKTTPPVLDSDGSFFLYSKLTVDKSRWQQGNVFSCSVMHEALHNHYTQKSLSLSPGGGGSGGGGSGGGGSGGGGSEVQLVESGGGLVQPGGSLKLSCAASGFTFNKYAMNWVRQAPGKCLEWVARIRSKYNNYATYYADSVKDRFTISRDDSKNTAYLQMNNLKTEDTAVYYCVRHGNFGNSYISYWAYWGQGTLVTVSSGGGGSGGGGSGGGGSGGGGSQTVVTQEPSLTVSPGGTVTLTCGSSTGAVTSGNYPNWVQQKPGQAPRGLIGGTKFLAPGTPARFSGSLLGGKAALTLSGVQPEDEAEYYCVLWYSNRWVFGCGTKLTVL

SEQ ID NO: 708 - protein, 715 aa, Artificial Sequence
  source: /note="Description of Artificial Sequence: Synthetic polypeptide"
QVQLVQSGAEVQRPGASVKVSCKASGYIFTEYYMYWVRQAPGQGLELVGRIDPEDGSIDYVEKFKKKVTLTADTSSSTAYMELSSLTSDDTAVYYCARGKFNYRFAYWGQGTLVTVSSASTKGPSVFPLAPSSKSTSGGTAALGCLVKDYFPEPVTVSWNSGALTSGVHTFPAVLQSSGLYSLSSVVTVPSSSLGTQTYICNVNHKPSNTKVDKRVEPKSCDKTHTCPPCPAPELLGGPSVFLFPPKPKDTLMISRTPEVTCVVVAVSHEDPEVKFNWYVDGVEVHNAKTKPREEQYASTYRVVSVLTVLHQDWLNGKEYKCKVSNKALAAPIEKTISKAKGQPREPQVYTLPPSREEMTKNQVSLTCLVKGFYPSDIAVEWESNGQPENNYKTTPPVLDSDGSFFLYSKLTVDKSRWQQGNVFSCSVMHEALHNHYTQKSLSLSPGGGGSGGGGSGGGGSGGGGSEVQLVESGGGLVQPGGSLKLSCAASGFTFNTYAMNWVRQASGKCLEWVGRIRSKYNNYATYYADSVKDRFTISRDDSKSTLYLQMNSLKTEDTAVYYCVRHGNFGNSYVSWFAYWGQGTLVTVSSGGGGSGGGGSGGGGSQAVVTQEPSLTVSPGGTVTLTCRSSTGAVTTSNYANWVQQKPGQAPRGLIGGTNKRAPWTPARFSGSLLGDKAALTLSGAQPEDEAEYFCALWYSNLWVFGCGTKLTVL

SEQ ID NO: 709 - protein, 722 aa, Artificial Sequence
  source: /note="Description of Artificial Sequence: Synthetic polypeptide"
QVQLVQSGAEVKKPGASVKVSCKASGYTFTSYYIHWVRQAPGQGLEWIGCIYPGNVNTNYNEKFKDRATLTVDTSISTAYMELSRLRSDDTAVYFCTRSHYGLDWNFDVWGQGTTVTVSSASTKGPSVFPLAPSSKSTSGGTAALGCLVKDYFPEPVTVSWNSGALTSGVHTFPAVLQSSGLYSLSSVVTVPSSSLGTQTYICNVNHKPSNTKVDKRVEPKSCDKTHTCPPCPAPELLGGPSVFLFPPKPKDTLMISRTPEVTCVVVAVSHEDPEVKFNWYVDGVEVHNAKTKPREEQYASTYRVVSVLTVLHQDWLNGKEYKCKVSNKALAAPIEKTISKAKGQPREPQVYTLPPSREEMTKNQVSLTCLVKGFYPSDIAVEWESNGQPENNYKTTPPVLDSDGSFFLYSKLTVDKSRWQQGNVFSCSVMHEALHNHYTQKSLSLSPGGGGSGGGGSGGGGSGGGGSEVQLVESGGGLVQPGGSLKLSCAASGFTFNKYAMNWVRQAPGKCLEWVARIRSKYNNYATYYADSVKDRFTISRDDSKNTAYLQMNNLKTEDTAVYYCVRHGNFGNSYISYWAYWGQGTLVTVSSGGGGSGGGGSGGGGSGGGGSQTVVTQEPSLTVSPGGTVTLTCGSSTGAVTSGNYPNWVQQKPGQAPRGLIGGTKFLAPGTPARFSGSLLGGKAALTLSGVQPEDEAEYYCVLWYSNRWVFGCGTKLTVL

SEQ ID NO: 710 - protein, 717 aa, Artificial Sequence
  source: /note="Description of Artificial Sequence: Synthetic polypeptide"
QVQLVQSGAEVKKPGASVKVSCKASGYTFTSYYIHWVRQAPGQGLEWIGCIYPGNVNTNYNEKFKDRATLTVDTSISTAYMELSRLRSDDTAVYFCTRSHYGLDWNFDVWGQGTTVTVSSASTKGPSVFPLAPSSKSTSGGTAALGCLVKDYFPEPVTVSWNSGALTSGVHTFPAVLQSSGLYSLSSVVTVPSSSLGTQTYICNVNHKPSNTKVDKRVEPKSCDKTHTCPPCPAPELLGGPSVFLFPPKPKDTLMISRTPEVTCVVVAVSHEDPEVKFNWYVDGVEVHNAKTKPREEQYASTYRVVSVLTVLHQDWLNGKEYKCKVSNKALAAPIEKTISKAKGQPREPQVYTLPPSREEMTKNQVSLTCLVKGFYPSDIAVEWESNGQPENNYKTTPPVLDSDGSFFLYSKLTVDKSRWQQGNVFSCSVMHEALHNHYTQKSLSLSPGGGGSGGGGSGGGGSGGGGSEVQLVESGGGLVQPGGSLKLSCAASGFTFNTYAMNWVRQASGKCLEWVGRIRSKYNNYATYYADSVKDRFTISRDDSKSTLYLQMNSLKTEDTAVYYCVRHGNFGNSYVSWFAYWGQGTLVTVSSGGGGSGGGGSGGGGSQAVVTQEPSLTVSPGGTVTLTCRSSTGAVTTSNYANWVQQKPGQAPRGLIGGTNKRAPWTPARFSGSLLGDKAALTLSGAQPEDEAEYFCALWYSNLWVFGCGTKLTVL

SEQ ID NO: 711 - protein, 713 aa, Artificial Sequence
  source: /note="Description of Artificial Sequence: Synthetic polypeptide"
QVQLVQSGGGVVQPGRSLRLSCKASGYTFTRYTMHWVRQAPGKGLEWIGYINPSRGYTNYNQKVKDRFTISRDNSKNTAFLQMDSLRPEDTGVYFCARYYDDHYSLDYWGQGTPVTVSSGGGGSGGGGSGGGGSGGGGSDIQMTQSPSSLSASVGDRVTITCSASSSVSYMNWYQQTPGKAPKRWIYDTSKLASGVPSRFSGSGSGTDYTFTISSLQPEDIATYYCQQWSSNPFTFGQGTKLQITGGGGSGGGGSGGGGSGGGGSQVQLVQSGAEVQRPGASVKVSCKASGYIFTEYYMYWVRQAPGQGLELVGRIDPEDGSIDYVEKFKKKVTLTADTSSSTAYMELSSLTSDDTAVYYCARGKFNYRFAYWGQGTLVTVSSASTKGPSVFPLAPSSKSTSGGTAALGCLVKDYFPEPVTVSWNSGALTSGVHTFPAVLQSSGLYSLSSVVTVPSSSLGTQTYICNVNHKPSNTKVDKRVEPKSCDKTHTCPPCPAPELLGGPSVFLFPPKPKDTLMISRTPEVTCVVVDVSHEDPEVKFNWYVDGVEVHNAKTKPREEQYNSTYRVVSVLTVLHQDWLNGKEYKCKVSNKALPAPIEKTISKAKGQPREPQVYTLPPSREEMTKNQVSLTCLVKGFYPSDIAVEWESNGQPENNYKTTPPVLDSDGSFFLYSKLTVDKSRWQQGNVFSCSVMHEALHNHYTQKSLSLSPGK

SEQ ID NO: 712 - protein, 715 aa, Artificial Sequence
  source: /note="Description of Artificial Sequence: Synthetic polypeptide"
QVQLVQSGGGVVQPGRSLRLSCKASGYTFTRYTMHWVRQAPGKGLEWIGYINPSRGYTNYNQKVKDRFTISRDNSKNTAFLQMDSLRPEDTGVYFCARYYDDHYSLDYWGQGTPVTVSSGGGGSGGGGSGGGGSGGGGSDIQMTQSPSSLSASVGDRVTITCSASSSVSYMNWYQQTPGKAPKRWIYDTSKLASGVPSRFSGSGSGTDYTFTISSLQPEDIATYYCQQWSSNPFTFGQGTKLQITGGGGSGGGGSGGGGSGGGGSQVQLVQSGAEVKKPGASVKVSCKASGYTFTSYYIHWVRQAPGQGLEWIGCIYPGNVNTNYNEKFKDRATLTVDTSISTAYMELSRLRSDDTAVYFCTRSHYGLDWNFDVWGQGTTVTVSSASTKGPSVFPLAPSSKSTSGGTAALGCLVKDYFPEPVTVSWNSGALTSGVHTFPAVLQSSGLYSLSSVVTVPSSSLGTQTYICNVNHKPSNTKVDKRVEPKSCDKTHTCPPCPAPELLGGPSVFLFPPKPKDTLMISRTPEVTCVVVDVSHEDPEVKFNWYVDGVEVHNAKTKPREEQYNSTYRVVSVLTVLHQDWLNGKEYKCKVSNKALPAPIEKTISKAKGQPREPQVYTLPPSREEMTKNQVSLTCLVKGFYPSDIAVEWESNGQPENNYKTTPPVLDSDGSFFLYSKLTVDKSRWQQGNVFSCSVMHEALHNHYTQKSLSLSPGK

SEQ ID NO: 713 - protein, 711 aa, Artificial Sequence
  source: /note="Description of Artificial Sequence: Synthetic polypeptide"
QVQLVQSGAEVQRPGASVKVSCKASGYIFTEYYMYWVRQAPGQGLELVGRIDPEDGSIDYVEKFKKKVTLTADTSSSTAYMELSSLTSDDTAVYYCARGKFNYRFAYWGQGTLVTVSSASTKGPSVFPLAPSSKSTSGGTAALGCLVKDYFPEPVTVSWNSGALTSGVHTFPAVLQSSGLYSLSSVVTVPSSSLGTQTYICNVNHKPSNTKVDKRVEPKSCDKTHTCPPCPAPELLGGPSVFLFPPKPKDTLMISRTPEVTCVVVDVSHEDPEVKFNWYVDGVEVHNAKTKPREEQYNSTYRVVSVLTVLHQDWLNGKEYKCKVSNKALPAPIEKTISKAKGQPREPQVYTLPPSREEMTKNQVSLTCLVKGFYPSDIAVEWESNGQPENNYKTTPPVLDSDGSFFLYSKLTVDKSRWQQGNVFSCSVMHEALHNHYTQKSLSLSPGGGGSGGGGSGGGGSGGGGSQVQLVQSGGGVVQPGRSLRLSCKASGYTFTRYTMHWVRQAPGKGLEWIGYINPSRGYTNYNQKVKDRFTISRDNSKNTAFLQMDSLRPEDTGVYFCARYYDDHYSLDYWGQGTPVTVSSGGGGSGGGGSGGGGSGGGGSDIQMTQSPSSLSASVGDRVTITCSASSSVSYMNWYQQTPGKAPKRWIYDTSKLASGVPSRFSGSGSGTDYTFTISSLQPEDIATYYCQQWSSNPFTFGQGTKLQIT

SEQ ID NO: 714 - protein, 713 aa, Artificial Sequence
  source: /note="Description of Artificial Sequence: Synthetic polypeptide"
QVQLVQSGAEVKKPGASVKVSCKASGYTFTSYYIHWVRQAPGQGLEWIGCIYPGNVNTNYNEKFKDRATLTVDTSISTAYMELSRLRSDDTAVYFCTRSHYGLDWNFDVWGQGTTVTVSSASTKGPSVFPLAPSSKSTSGGTAALGCLVKDYFPEPVTVSWNSGALTSGVHTFPAVLQSSGLYSLSSVVTVPSSSLGTQTYICNVNHKPSNTKVDKRVEPKSCDKTHTCPPCPAPELLGGPSVFLFPPKPKDTLMISRTPEVTCVVVDVSHEDPEVKFNWYVDGVEVHNAKTKPREEQYNSTYRVVSVLTVLHQDWLNGKEYKCKVSNKALPAPIEKTISKAKGQPREPQVYTLPPSREEMTKNQVSLTCLVKGFYPSDIAVEWESNGQPENNYKTTPPVLDSDGSFFLYSKLTVDKSRWQQGNVFSCSVMHEALHNHYTQKSLSLSPGGGGSGGGGSGGGGSGGGGSQVQLVQSGGGVVQPGRSLRLSCKASGYTFTRYTMHWVRQAPGKGLEWIGYINPSRGYTNYNQKVKDRFTISRDNSKNTAFLQMDSLRPEDTGVYFCARYYDDHYSLDYWGQGTPVTVSSGGGGSGGGGSGGGGSGGGGSDIQMTQSPSSLSASVGDRVTITCSASSSVSYMNWYQQTPGKAPKRWIYDTSKLASGVPSRFSGSGSGTDYTFTISSLQPEDIATYYCQQWSSNPFTFGQGTKLQIT

SEQ ID NO: 715 - protein, 723 aa, Artificial Sequence
  source: /note="Description of Artificial Sequence: Synthetic polypeptide"
QVQLVQSGAEVQRPGASVKVSCKASGYIFTEYYMYWVRQAPGQGLELVGRIDPEDGSIDYVEKFKKKVTLTADTSSSTAYMELSSLTSDDTAVYYCARGKFNYRFAYWGQGTLVTVSSASTKGPSVFPLAPSSKSTSGGTAALGCLVKDYFPEPVTVSWNSGALTSGVHTFPAVLQSSGLYSLSSVVTVPSSSLGTQTYICNVNHKPSNTKVDKRVEPKSCGGGGSGGGGSQVQLVQSGGGVVQPGRSLRLSCKASGYTFTRYTMHWVRQAPGKGLEWIGYINPSRGYTNYNQKVKDRFTISRDNSKNTAFLQMDSLRPEDTGVYFCARYYDDHYSLDYWGQGTPVTVSSGGGGSGGGGSGGGGSGGGGSDIQMTQSPSSLSASVGDRVTITCSASSSVSYMNWYQQTPGKAPKRWIYDTSKLASGVPSRFSGSGSGTDYTFTISSLQPEDIATYYCQQWSSNPFTFGQGTKLQITGGGGSGGGGSGGGGSGGGGSDKTHTCPPCPAPELLGGPSVFLFPPKPKDTLMISRTPEVTCVVVDVSHEDPEVKFNWYVDGVEVHNAKTKPREEQYNSTYRVVSVLTVLHQDWLNGKEYKCKVSNKALPAPIEKTISKAKGQPREPQVYTLPPSREEMTKNQVSLTCLVKGFYPSDIAVEWESNGQPENNYKTTPPVLDSDGSFFLYSKLTVDKSRWQQGNVFSCSVMHEALHNHYTQKSLSLSPGK

SEQ ID NO: 716 - protein, 725 aa, Artificial Sequence
  source: /note="Description of Artificial Sequence: Synthetic polypeptide"
QVQLVQSGAEVKKPGASVKVSCKASGYTFTSYYIHWVRQAPGQGLEWIGCIYPGNVNTNYNEKFKDRATLTVDTSISTAYMELSRLRSDDTAVYFCTRSHYGLDWNFDVWGQGTTVTVSSASTKGPSVFPLAPSSKSTSGGTAALGCLVKDYFPEPVTVSWNSGALTSGVHTFPAVLQSSGLYSLSSVVTVPSSSLGTQTYICNVNHKPSNTKVDKRVEPKSCGGGGSGGGGSQVQLVQSGGGVVQPGRSLRLSCKASGYTFTRYTMHWVRQAPGKGLEWIGYINPSRGYTNYNQKVKDRFTISRDNSKNTAFLQMDSLRPEDTGVYFCARYYDDHYSLDYWGQGTPVTVSSGGGGSGGGGSGGGGSGGGGSDIQMTQSPSSLSASVGDRVTITCSASSSVSYMNWYQQTPGKAPKRWIYDTSKLASGVPSRFSGSGSGTDYTFTISSLQPEDIATYYCQQWSSNPFTFGQGTKLQITGGGGSGGGGSGGGGSGGGGSDKTHTCPPCPAPELLGGPSVFLFPPKPKDTLMISRTPEVTCVVVDVSHEDPEVKFNWYVDGVEVHNAKTKPREEQYNSTYRVVSVLTVLHQDWLNGKEYKCKVSNKALPAPIEKTISKAKGQPREPQVYTLPPSREEMTKNQVSLTCLVKGFYPSDIAVEWESNGQPENNYKTTPPVLDSDGSFFLYSKLTVDKSRWQQGNVFSCSVMHEALHNHYTQKSLSLSPGK

SEQ ID NO: 717 - protein, 716 aa, Artificial Sequence
  source: /note="Description of Artificial Sequence: Synthetic polypeptide"
QVQLVQSGGGVVQPGRSLRLSCKASGYTFTRYTMHWVRQAPGKGLEWIGYINPSRGYTNYNQKVKDRFTISRDNSKNTAFLQMDSLRPEDTGVYFCARYYDDHYSLDYWGQGTPVTVSSGGGGSGGGGSGGGGSGGGGSDIQMTQSPSSLSASVGDRVTITCSASSSVSYMNWYQQTPGKAPKRWIYDTSKLASGVPSRFSGSGSGTDYTFTISSLQPEDIATYYCQQWSSNPFTFGQGTKLQITGGGGSDKTHTCPPCPAPELLGGPSVFLFPPKPKDTLMISRTPEVTCVVVDVSHEDPEVKFNWYVDGVEVHNAKTKPREEQYNSTYRVVSVLTVLHQDWLNGKEYKCKVSNKALPAPIEKTISKAKGQPREPQVYTLPPSREEMTKNQVSLTCLVKGFYPSDIAVEWESNGQPENNYKTTPPVLDSDGSFFLYSKLTVDKSRWQQGNVFSCSVMHEALHNHYTQKSLSLSPGGGGSGGGGSGGGGSGGGGSQVQLVQSGAEVQRPGASVKVSCKASGYIFTEYYMYWVRQAPGQGLELVGRIDPEDGSIDYVEKFKKKVTLTADTSSSTAYMELSSLTSDDTAVYYCARGKFNYRFAYWGQGTLVTVSSASTKGPSVFPLAPSSKSTSGGTAALGCLVKDYFPEPVTVSWNSGALTSGVHTFPAVLQSSGLYSLSSVVTVPSSSLGTQTYICNVNHKPSNTKVDKRVEPKSC

SEQ ID NO: 718 - protein, 718 aa, Artificial Sequence
  source: /note="Description of Artificial Sequence: Synthetic polypeptide"
QVQLVQSGGGVVQPGRSLRLSCKASGYTFTRYTMHWVRQAPGKGLEWIGYINPSRGYTNYNQKVKDRFTISRDNSKNTAFLQMDSLRPEDTGVYFCARYYDDHYSLDYWGQGTPVTVSSGGGGSGGGGSGGGGSGGGGSDIQMTQSPSSLSASVGDRVTITCSASSSVSYMNWYQQTPGKAPKRWIYDTSKLASGVPSRFSGSGSGTDYTFTISSLQPEDIATYYCQQWSSNPFTFGQGTKLQITGGGGSDKTHTCPPCPAPELLGGPSVFLFPPKPKDTLMISRTPEVTCVVVDVSHEDPEVKFNWYVDGVEVHNAKTKPREEQYNSTYRVVSVLTVLHQDWLNGKEYKCKVSNKALPAPIEKTISKAKGQPREPQVYTLPPSREEMTKNQVSLTCLVKGFYPSDIAVEWESNGQPENNYKTTPPVLDSDGSFFLYSKLTVDKSRWQQGNVFSCSVMHEALHNHYTQKSLSLSPGGGGSGGGGSGGGGSGGGGSQVQLVQSGAEVKKPGASVKVSCKASGYTFTSYYIHWVRQAPGQGLEWIGCIYPGNVNTNYNEKFKDRATLTVDTSISTAYMELSRLRSDDTAVYFCTRSHYGLDWNFDVWGQGTTVTVSSASTKGPSVFPLAPSSKSTSGGTAALGCLVKDYFPEPVTVSWNSGALTSGVHTFPAVLQSSGLYSLSSVVTVPSSSLGTQTYICNVNHKPSNTKVDKRVEPKSC

SEQ ID NO: 719 - protein, 448 aa, Artificial Sequence
  source: /note="Description of Artificial Sequence: Synthetic polypeptide"
QVQLVQSGAEVQRPGASVKVSCKASGYIFTEYYMYWVRQAPGQGLELVGRIDPEDGSIDYVEKFKKKVTLTADTSSSTAYMELSSLTSDDTAVYYCARGKFNYRFAYWGQGTLVTVSSASTKGPSVFPLAPSSKSTSGGTAALGCLVKDYFPEPVTVSWNSGALTSGVHTFPAVLQSSGLYSLSSVVTVPSSSLGTQTYICNVNHKPSNTKVDKRVEPKSCDKTHTCPPCPAPELLGGPSVFLFPPKPKDTLMISRTPEVTCVVVDVSHEDPEVKFNWYVDGVEVHNAKTKPREEQYNSTYRVVSVLTVLHQDWLNGKEYKCKVSNKALPAPIEKTISKAKGQPREPQVCTLPPSREEMTKNQVSLSCAVKGFYPSDIAVEWESNGQPENNYKTTPPVLDSDGSFFLVSKLTVDKSRWQQGNVFSCSVMHEALHNRFTQKSLSLSPGK

SEQ ID NO: 720 - protein, 477 aa, Artificial Sequence
  source: /note="Description of Artificial Sequence: Synthetic polypeptide"
QVQLVQSGGGVVQPGRSLRLSCKASGYTFTRYTMHWVRQAPGKGLEWIGYINPSRGYTNYNQKVKDRFTISRDNSKNTAFLQMDSLRPEDTGVYFCARYYDDHYSLDYWGQGTPVTVSSGGGGSGGGGSGGGGSGGGGSDIQMTQSPSSLSASVGDRVTITCSASSSVSYMNWYQQTPGKAPKRWIYDTSKLASGVPSRFSGSGSGTDYTFTISSLQPEDIATYYCQQWSSNPFTFGQGTKLQITGGGGSDKTHTCPPCPAPELLGGPSVFLFPPKPKDTLMISRTPEVTCVVVDVSHEDPEVKFNWYVDGVEVHNAKTKPREEQYNSTYRVVSVLTVLHQDWLNGKEYKCKVSNKALPAPIEKTISKAKGQPREPQVYTLPPCREEMTKNQVSLWCLVKGFYPSDIAVEWESNGQPENNYKTTPPVLDSDGSFFLYSKLTVDKSRWQQGNVFSCSVMHEALHNHYTQKSLSLSPGK

SEQ ID NO: 721 - protein, 450 aa, Artificial Sequence
  source: /note="Description of Artificial Sequence: Synthetic polypeptide"
QVQLVQSGAEVKKPGASVKVSCKASGYTFTSYYIHWVRQAPGQGLEWIGCIYPGNVNTNYNEKFKDRATLTVDTSISTAYMELSRLRSDDTAVYFCTRSHYGLDWNFDVWGQGTTVTVSSASTKGPSVFPLAPSSKSTSGGTAALGCLVKDYFPEPVTVSWNSGALTSGVHTFPAVLQSSGLYSLSSVVTVPSSSLGTQTYICNVNHKPSNTKVDKRVEPKSCDKTHTCPPCPAPELLGGPSVFLFPPKPKDTLMISRTPEVTCVVVDVSHEDPEVKFNWYVDGVEVHNAKTKPREEQYNSTYRVVSVLTVLHQDWLNGKEYKCKVSNKALPAPIEKTISKAKGQPREPQVCTLPPSREEMTKNQVSLSCAVKGFYPSDIAVEWESNGQPENNYKTTPPVLDSDGSFFLVSKLTVDKSRWQQGNVFSCSVMHEALHNRFTQKSLSLSPGK

SEQ ID NO: 722 - protein, 227 aa, Artificial Sequence
  source: /note="Description of Artificial Sequence: Synthetic polypeptide"
DKTHTCPPCPAPELLGGPSVFLFPPKPKDTLMISRTPEVTCVVVDVSHEDPEVKFNWYVDGVEVHNAKTKPREEQYNSTYRVVSVLTVLHQDWLNGKEYKCKVSNKALPAPIEKTISKAKGQPREPQVCTLPPSREEMTKNQVSLSCAVKGFYPSDIAVEWESNGQPENNYKTTPPVLDSDGSFFLVSKLTVDKSRWQQGNVFSCSVMHEALHNRFTQKSLSLSPGK

SEQ ID NO: 723 - protein, 534 aa, Artificial Sequence
  source: /note="Description of Artificial Sequence: Synthetic polypeptide"
QVQLVQSGGGVVQPGRSLRLSCKASGYTFTRYTMHWVRQAPGKGLEWIGYINPSRGYTNYNQKVKDRFTISRDNSKNTAFLQMDSLRPEDTGVYFCARYYDDHYSLDYWGQGTPVTVSSGGGGSGGGGSGGGGSGGGGSDIQMTQSPSSLSASVGDRVTITCSASSSVSYMNWYQQTPGKAPKRWIYDTSKLASGVPSRFSGSGSGTDYTFTISSLQPEDIATYYCQQWSSNPFTFGQGTKLQITGGGGSDKTHTCPPCPAPELLGGPSVFLFPPKPKDTLMISRTPEVTCVVVDVSHEDPEVKFNWYVDGVEVHNAKTKPREEQYNSTYRVVSVLTVLHQDWLNGKEYKCKVSNKALPAPIEKTISKAKGQPREPQVYTLPPCREEMTKNQVSLWCLVKGFYPSDIAVEWESNGQPENNYKTTPPVLDSDGSFFLYSKLTVDKSRWQQGNVFSCSVMHEALHNHYTQKSLSLSPGGGGGSGGGGSGGGGSEEDPCACESLVKFQAKVEGLLQALTRKLEAVSKRLAILENTVV

SEQ ID NO: 724 - protein, 529 aa, Artificial Sequence
  source: /note="Description of Artificial Sequence: Synthetic polypeptide"
QVQLVQSGGGVVQPGRSLRLSCKASGYTFTRYTMHWVRQAPGKGLEWIGYINPSRGYTNYNQKVKDRFTISRDNSKNTAFLQMDSLRPEDTGVYFCARYYDDHYSLDYWGQGTPVTVSSGGGGSGGGGSGGGGSGGGGSDIQMTQSPSSLSASVGDRVTITCSASSSVSYMNWYQQTPGKAPKRWIYDTSKLASGVPSRFSGSGSGTDYTFTISSLQPEDIATYYCQQWSSNPFTFGQGTKLQITGGGGSDKTHTCPPCPAPELLGGPSVFLFPPKPKDTLMISRTPEVTCVVVDVSHEDPEVKFNWYVDGVEVHNAKTKPREEQYNSTYRVVSVLTVLHQDWLNGKEYKCKVSNKALPAPIEKTISKAKGQPREPQVYTLPPCREEMTKNQVSLWCLVKGFYPSDIAVEWESNGQPENNYKTTPPVLDSDGSFFLYSKLTVDKSRWQQGNVFSCSVMHEALHNHYTQKSLSLSPGGGGGSDLGPQMLRELQETNAALQDVRELLRQQVREITFLKNTVMECDACGMQQ

SEQ ID NO: 725 - DNA, 2238 bp, Artificial Sequence
  source: /note="Description of Artificial Sequence: Synthetic polynucleotide"
atggccctccctgtcaccgccctgctgcttccgctggctcttctgctccacgccgctcggcccgaaattgtgatgacccagtcacccgccactcttagcctttcacccggtgagcgcgcaaccctgtcttgcagagcctcccaagacatctcaaaataccttaattggtatcaacagaagcccggacaggctcctcgccttctgatctaccacaccagccggctccattctggaatccctgccaggttcagcggtagcggatctgggaccgactacaccctcactatcagctcactgcagccagaggacttcgctgtctatttctgtcagcaagggaacaccctgccctacacctttggacagggcaccaagctcgagattaaaggtggaggtggcagcggaggaggtgggtccggcggtggaggaagccaggtccaactccaagaaagcggaccgggtcttgtgaagccatcagaaactctttcactgacttgtactgtgagcggagtgtctctccccgattacggggtgtcttggatcagacagccaccggggaagggtctggaatggattggagtgatttggggctctgagactacttactaccaatcatccctcaagtcacgcgtcaccatctcaaaggacaactctaagaatcaggtgtcactgaaactgtcatctgtgaccgcagccgacaccgccgtgtactattgcgctaagcattactattatggcgggagctacgcaatggattactggggacagggtactctggtcaccgtgtccagcttggcagaagccgccgcgaaagaagtgcagcttcaacaatcaggaccaggactcgtcaaaccatcacagaccctctccctcacatgtgccatctccggggactccatgttgagcaattccgacacttggaattggattagacaaagcccgtcccggggtctggaatggttgggacgcacctaccaccggtctacttggtacgacgactacgcgtcatccgtgcggggaagagtgtccatcaacgtggacacctccaagaaccagtacagcctgcagcttaatgccgtgactcctgaggatacgggcgtctactactgcgcccgcgtccgcctgcaagacgggaacagctggagcgatgcattcgatgtctggggccagggaactatggtcaccgtgtcgtctgggggcggtggatcgggtggcgggggttcggggggcggcggctctcagtccgctcttacccaaccggcctcagcctcggggagccccggccagagcgtgaccatttcctgcaccggcacttcatccgacgtgggcggctacaactacgtgtcctggtaccaacagcacccgggaaaggcccccaagctcatgatctacgacgtgtccaacaggccctcgggagtgtccaaccggttctcgggttcgaaatcgggaaacacagccagcctgaccatcagcggactgcaggctgaagatgaagccgactactactgctcctcctacacctcgtcatccacgctctacgtgttcggcactggaactcagctgactgtgctgaccactaccccagcaccgaggccacccaccccggctcctaccatcgcctcccagcctctgtccctgcgtccggaggcatgtagacccgcagctggtggggccgtgcatacccggggtcttgacttcgcctgcgatatctacatttgggcccctctggctggtacttgcggggtcctgctgctttcactcgtgatcactctttactgtaagcgcggtcggaagaagctgctgtacatctttaagcaacccttcatgaggcctgtgcagactactcaagaggaggacggctgttcatgccggttcccagaggaggaggaaggcggctgcgaactgcgcgtgaaattcagccgcagcgcagatgctccagcctaccagcaggggcagaaccagctctacaacgaactcaatcttggtcggagagaggagtacgacgtgctggacaagcggagaggacgggacccagaaatgggcgggaagccgcgcagaaagaatccccaagagggcctgtacaacgagctccaaaaggataagatggcagaagcctatagcgagattggtatgaaaggggaacgcagaagaggcaaaggccacgacggactgtaccagggactcagcaccgccaccaaggacacctatgacgctcttcacatgcaggccctgccgcctcgg

SEQ ID NO: 726 - protein, 746 aa, Artificial Sequence
  source: /note="Description of Artificial Sequence: Synthetic polypeptide"
MALPVTALLLPLALLLHAARPEIVMTQSPATLSLSPGERATLSCRASQDISKYLNWYQQKPGQAPRLLIYHTSRLHSGIPARFSGSGSGTDYTLTISSLQPEDFAVYFCQQGNTLPYTFGQGTKLEIKGGGGSGGGGSGGGGSQVQLQESGPGLVKPSETLSLTCTVSGVSLPDYGVSWIRQPPGKGLEWIGVIWGSETTYYQSSLKSRVTISKDNSKNQVSLKLSSVTAADTAVYYCAKHYYYGGSYAMDYWGQGTLVTVSSLAEAAAKEVQLQQSGPGLVKPSQTLSLTCAISGDSMLSNSDTWNWIRQSPSRGLEWLGRTYHRSTWYDDYASSVRGRVSINVDTSKNQYSLQLNAVTPEDTGVYYCARVRLQDGNSWSDAFDVWGQGTMVTVSSGGGGSGGGGSGGGGSQSALTQPASASGSPGQSVTISCTGTSSDVGGYNYVSWYQQHPGKAPKLMIYDVSNRPSGVSNRFSGSKSGNTASLTISGLQAEDEADYYCSSYTSSSTLYVFGTGTQLTVLTTTPAPRPPTPAPTIASQPLSLRPEACRPAAGGAVHTRGLDFACDIYIWAPLAGTCGVLLLSLVITLYCKRGRKKLLYIFKQPFMRPVQTTQEEDGCSCRFPEEEEGGCELRVKFSRSADAPAYQQGQNQLYNELNLGRREEYDVLDKRRGRDPEMGGKPRRKNPQEGLYNELQKDKMAEAYSEIGMKGERRRGKGHDGLYQGLSTATKDTYDALHMQALPPR

SEQ ID NO: 727 - DNA, 2232 bp, Artificial Sequence
  source: /note="Description of Artificial Sequence: Synthetic polynucleotide"
atggccctccctgtcaccgccctgctgcttccgctggctcttctgctccacgccgctcggcccgaagtgcagcttcaacaatcaggaccaggactcgtcaaaccatcacagaccctctccctcacatgtgccatctccggggactccatgttgagcaattccgacacttggaattggattagacaaagcccgtcccggggtctggaatggttgggacgcacctaccaccggtctacttggtacgacgactacgcgtcatccgtgcggggaagagtgtccatcaacgtggacacctccaagaaccagtacagcctgcagcttaatgccgtgactcctgaggatacgggcgtctactactgcgcccgcgtccgcctgcaagacgggaacagctggagcgatgcattcgatgtctggggccagggaactatggtcaccgtgtcgtctgggggcggtggatcgggtggcgggggttcggggggcggcggctctcagtccgctcttacccaaccggcctcagcctcggggagccccggccagagcgtgaccatttcctgcaccggcacttcatccgacgtgggcggctacaactacgtgtcctggtaccaacagcacccgggaaaggcccccaagctcatgatctacgacgtgtccaacaggccctcgggagtgtccaaccggttctcgggttcgaaatcgggaaacacagccagcctgaccatcagcggactgcaggctgaagatgaagccgactactactgctcctcctacacctcgtcatccacgctctacgtgttcggcactggaactcagctgactgtgctgggagggggagggagtgaaattgtgatgacccagtcacccgccactcttagcctttcacccggtgagcgcgcaaccctgtcttgcagagcctcccaagacatctcaaaataccttaattggtatcaacagaagcccggacaggctcctcgccttctgatctaccacaccagccggctccattctggaatccctgccaggttcagcggtagcggatctgggaccgactacaccctcactatcagctcactgcagccagaggacttcgctgtctatttctgtcagcaagggaacaccctgccctacacctttggacagggcaccaagctcgagattaaaggtggaggtggcagcggaggaggtgggtccggcggtggaggaagccaggtccaactccaagaaagcggaccgggtcttgtgaagccatcagaaactctttcactgacttgtactgtgagcggagtgtctctccccgattacggggtgtcttggatcagacagccaccggggaagggtctggaatggattggagtgatttggggctctgagactacttactaccaatcatccctcaagtcacgcgtcaccatctcaaaggacaactctaagaatcaggtgtcactgaaactgtcatctgtgaccgcagccgacaccgccgtgtactattgcgctaagcattactattatggcgggagctacgcaatggattactggggacagggtactctggtcaccgtgtccagcaccactaccccagcaccgaggccacccaccccggctcctaccatcgcctcccagcctctgtccctgcgtccggaggcatgtagacccgcagctggtggggccgtgcatacccggggtcttgacttcgcctgcgatatctacatttgggcccctctggctggtacttgcggggtcctgctgctttcactcgtgatcactctttactgtaagcgcggtcggaagaagctgctgtacatctttaagcaacccttcatgaggcctgtgcagactactcaagaggaggacggctgttcatgccggttcccagaggaggaggaaggcggctgcgaactgcgcgtgaaattcagccgcagcgcagatgctccagcctaccagcaggggcagaaccagctctacaacgaactcaatcttggtcggagagaggagtacgacgtgctggacaagcggagaggacgggacccagaaatgggcgggaagccgcgcagaaagaatccccaagagggcctgtacaacgagctccaaaaggataagatggcagaagcctatagcgagattggtatgaaaggggaacgcagaagaggcaaaggccacgacggactgtaccagggactcagcaccgccaccaaggacacctatgacgctcttcacatgcaggccctgccgcctcgg

SEQ ID NO: 728 - protein, 744 aa, Artificial Sequence
  source: /note="Description of Artificial Sequence: Synthetic polypeptide"
MALPVTALLLPLALLLHAARPEVQLQQSGPGLVKPSQTLSLTCAISGDSMLSNSDTWNWIRQSPSRGLEWLGRTYHRSTWYDDYASSVRGRVSINVDTSKNQYSLQLNAVTPEDTGVYYCARVRLQDGNSWSDAFDVWGQGTMVTVSSGGGGSGGGGSGGGGSQSALTQPASASGSPGQSVTISCTGTSSDVGGYNYVSWYQQHPGKAPKLMIYDVSNRPSGVSNRFSGSKSGNTASLTISGLQAEDEADYYCSSYTSSSTLYVFGTGTQLTVLGGGGSEIVMTQSPATLSLSPGERATLSCRASQDISKYLNWYQQKPGQAPRLLIYHTSRLHSGIPARFSGSGSGTDYTLTISSLQPEDFAVYFCQQGNTLPYTFGQGTKLEIKGGGGSGGGGSGGGGSQVQLQESGPGLVKPSETLSLTCTVSGVSLPDYGVSWIRQPPGKGLEWIGVIWGSETTYYQSSLKSRVTISKDNSKNQVSLKLSSVTAADTAVYYCAKHYYYGGSYAMDYWGQGTLVTVSSTTTPAPRPPTPAPTIASQPLSLRPEACRPAAGGAVHTRGLDFACDIYIWAPLAGTCGVLLLSLVITLYCKRGRKKLLYIFKQPFMRPVQTTQEEDGCSCRFPEEEEGGCELRVKFSRSADAPAYQQGQNQLYNELNLGRREEYDVLDKRRGRDPEMGGKPRRKNPQEGLYNELQKDKMAEAYSEIGMKGERRRGKGHDGLYQGLSTATKDTYDALHMQALPPR

SEQ ID NO: 729 - DNA, 2202 bp, Artificial Sequence
  source: /note="Description of Artificial Sequence: Synthetic polynucleotide"
atggccctccctgtcaccgccctgctgcttccgctggctcttctgctccacgccgctcggccccagtccgctcttacccaaccggcctcagcctcggggagccccggccagagcgtgaccatttcctgcaccggcacttcatccgacgtgggcggctacaactacgtgtcctggtaccaacagcacccgggaaaggcccccaagctcatgatctacgacgtgtccaacaggccctcgggagtgtccaaccggttctcgggttcgaaatcgggaaacacagccagcctgaccatcagcggactgcaggctgaagatgaagccgactactactgctcctcctacacctcgtcatccacgctctacgtgttcggcactggaactcagctgactgtgctgggcggaggaggctccgaagtgcagcttcaacaatcaggaccaggactcgtcaaaccatcacagaccctctccctcacatgtgccatctccggggactccatgttgagcaattccgacacttggaattggattagacaaagcccgtcccggggtctggaatggttgggacgcacctaccaccggtctacttggtacgacgactacgcgtcatccgtgcggggaagagtgtccatcaacgtggacacctccaagaaccagtacagcctgcagcttaatgccgtgactcctgaggatacgggcgtctactactgcgcccgcgtccgcctgcaagacgggaacagctggagcgatgcattcgatgtctggggccagggaactatggtcaccgtgtcgtctggagggggagggagtgaaattgtgatgacccagtcacccgccactcttagcctttcacccggtgagcgcgcaaccctgtcttgcagagcctcccaagacatctcaaaataccttaattggtatcaacagaagcccggacaggctcctcgccttctgatctaccacaccagccggctccattctggaatccctgccaggttcagcggtagcggatctgggaccgactacaccctcactatcagctcactgcagccagaggacttcgctgtctatttctgtcagcaagggaacaccctgccctacacctttggacagggcaccaagctcgagattaaaggtggaggtggcagcggaggaggtgggtccggcggtggaggaagccaggtccaactccaagaaagcggaccgggtcttgtgaagccatcagaaactctttcactgacttgtactgtgagcggagtgtctctccccgattacggggtgtcttggatcagacagccaccggggaagggtctggaatggattggagtgatttggggctctgagactacttactaccaatcatccctcaagtcacgcgtcaccatctcaaaggacaactctaagaatcaggtgtcactgaaactgtcatctgtgaccgcagccgacaccgccgtgtactattgcgctaagcattactattatggcgggagctacgcaatggattactggggacagggtactctggtcaccgtgtccagcaccactaccccagcaccgaggccacccaccccggctcctaccatcgcctcccagcctctgtccctgcgtccggaggcatgtagacccgcagctggtggggccgtgcatacccggggtcttgacttcgcctgcgatatctacatttgggcccctctggctggtacttgcggggtcctgctgctttcactcgtgatcactctttactgtaagcgcggtcggaagaagctgctgtacatctttaagcaacccttcatgaggcctgtgcagactactcaagaggaggacggctgttcatgccggttcccagaggaggaggaaggcggctgcgaactgcgcgtgaaattcagccgcagcgcagatgctccagcctaccagcaggggcagaaccagctctacaacgaactcaatcttggtcggagagaggagtacgacgtgctggacaagcggagaggacgggacccagaaatgggcgggaagccgcgcagaaagaatccccaagagggcctgtacaacgagctccaaaaggataagatggcagaagcctatagcgagattggtatgaaaggggaacgcagaagaggcaaaggccacgacggactgtaccagggactcagcaccgccaccaaggacacctatgacgctcttcacatgcaggccctgccgcctcgg

SEQ ID NO: 730 - protein, 734 aa, Artificial Sequence
  source: /note="Description of Artificial Sequence: Synthetic polypeptide"
MALPVTALLLPLALLLHAARPQSALTQPASASGSPGQSVTISCTGTSSDVGGYNYVSWYQQHPGKAPKLMIYDVSNRPSGVSNRFSGSKSGNTASLTISGLQAEDEADYYCSSYTSSSTLYVFGTGTQLTVLGGGGSEVQLQQSGPGLVKPSQTLSLTCAISGDSMLSNSDTWNWIRQSPSRGLEWLGRTYHRSTWYDDYASSVRGRVSINVDTSKNQYSLQLNAVTPEDTGVYYCARVRLQDGNSWSDAFDVWGQGTMVTVSSGGGGSEIVMTQSPATLSLSPGERATLSCRASQDISKYLNWYQQKPGQAPRLLIYHTSRLHSGIPARFSGSGSGTDYTLTISSLQPEDFAVYFCQQGNTLPYTFGQGTKLEIKGGGGSGGGGSGGGGSQVQLQESGPGLVKPSETLSLTCTVSGVSLPDYGVSWIRQPPGKGLEWIGVIWGSETTYYQSSLKSRVTISKDNSKNQVSLKLSSVTAADTAVYYCAKHYYYGGSYAMDYWGQGTLVTVSSTTTPAPRPPTPAPTIASQPLSLRPEACRPAAGGAVHTRGLDFACDIYIWAPLAGTCGVLLLSLVITLYCKRGRKKLLYIFKQPFMRPVQTTQEEDGCSCRFPEEEEGGCELRVKFSRSADAPAYQQGQNQLYNELNLGRREEYDVLDKRRGRDPEMGGKPRRKNPQEGLYNELQKDKMAEAYSEIGMKGERRRGKGHDGLYQGLSTATKDTYDALHMQALPPR

SEQ ID NO: 731 - DNA, 2232 bp, Artificial Sequence
  source: /note="Description of Artificial Sequence: Synthetic polynucleotide"
atggccctgcccgtgactgcgctcctgcttccgttggccctgctcctgcatgccgccagacctcagtccgctctgactcagccggcctcagcttcggggtcccctggtcaaagcgtcactatttcctgtaccggaacctcatcagacgtgggcggctacaattacgtgtcctggtaccaacagcaccccggaaaggctcctaagcttatgatctacgacgtgtccaaccggccgtcaggagtgtccaacagattctccggctccaagagcggaaacactgccagcttgaccattagcggcttgcaggccgaggacgaagccgactactactgctctagctacacatcctcgtctaccctctacgtgtttggaacggggacccagctgactgtgctcgggggtggaggatcagaggtgcaactccagcagtccggtcctggcctcgtgaaaccgtcccaaaccctgtccctgacttgcgccatctcgggcgactccatgctgtccaattccgacacctggaactggattagacaatcgcctagccggggactcgaatggctgggccggacctaccaccggtccacgtggtatgacgactacgcaagctccgtccggggaagggtgtccattaacgtcgatacctccaagaaccagtacagccttcagctgaacgctgtgacccccgaggataccggcgtctactactgtgcaagagtgcgattgcaggatggaaactcgtggtcggacgcattcgatgtctggggacagggaactatggtgaccgtgtcctcgggcggaggcgggagcggaggaggaggctctggcggaggaggaagcgagattgtcatgactcagtccccggccacactctccctgtcacccggagaaagagcaaccctgagctgcagggcgtcccaggacatctcgaagtacctgaactggtaccagcagaagcctggacaagcaccccgcctcctgatctaccacacctcgcggctgcattcgggaatccccgccagattctcagggagcggatcaggaaccgactacaccctgactatctcgagcctgcaaccagaggatttcgccgtgtacttctgccagcaaggaaacaccctgccctacacctttggacagggaaccaagctcgagattaaggggggtggtggatcgggagggggtggatcaggaggaggcggctcacaagtccagctgcaagaatccggtccgggacttgtgaagccgtccgaaaccctgtcactgacttgcactgtgtccggggtgtcattgcccgactacggcgtgagctggattcggcagccccctggaaagggattggaatggatcggcgtgatctggggttcggaaactacctactatcagtcctcactgaagtcccgcgtgaccatcagcaaggataattccaaaaaccaagtgtctctgaagctctccagcgtcactgccgccgatactgccgtgtactactgcgccaagcactactattacggcggttcgtacgccatggactactggggccaagggacactcgtgaccgtgtcatccaccactaccccagcaccgaggccacccaccccggctcctaccatcgcctcccagcctctgtccctgcgtccggaggcatgtagacccgcagctggtggggccgtgcatacccggggtcttgacttcgcctgcgatatctacatttgggcccctctggctggtacttgcggggtcctgctgctttcactcgtgatcactctttactgtaagcgcggtcggaagaagctgctgtacatctttaagcaacccttcatgaggcctgtgcagactactcaagaggaggacggctgttcatgccggttcccagaggaggaggaaggcggctgcgaactgcgcgtgaaattcagccgcagcgcagatgctccagcctaccagcaggggcagaaccagctctacaacgaactcaatcttggtcggagagaggagtacgacgtgctggacaagcggagaggacgggacccagaaatgggcgggaagccgcgcagaaagaatccccaagagggcctgtacaacgagctccaaaaggataagatggcagaagcctatagcgagattggtatgaaaggggaacgcagaagaggcaaaggccacgacggactgtaccagggactcagcaccgccaccaaggacacctatgacgctcttcacatgcaggccctgccgcctcgg

SEQ ID NO: 732 - protein, 744 aa, Artificial Sequence
  source: /note="Description of Artificial Sequence: Synthetic polypeptide"
MALPVTALLLPLALLLHAARPQSALTQPASASGSPGQSVTISCTGTSSDVGGYNYVSWYQQHPGKAPKLMIYDVSNRPSGVSNRFSGSKSGNTASLTISGLQAEDEADYYCSSYTSSSTLYVFGTGTQLTVLGGGGSEVQLQQSGPGLVKPSQTLSLTCAISGDSMLSNSDTWNWIRQSPSRGLEWLGRTYHRSTWYDDYASSVRGRVSINVDTSKNQYSLQLNAVTPEDTGVYYCARVRLQDGNSWSDAFDVWGQGTMVTVSSGGGGSGGGGSGGGGSEIVMTQSPATLSLSPGERATLSCRASQDISKYLNWYQQKPGQAPRLLIYHTSRLHSGIPARFSGSGSGTDYTLTISSLQPEDFAVYFCQQGNTLPYTFGQGTKLEIKGGGGSGGGGSGGGGSQVQLQESGPGLVKPSETLSLTCTVSGVSLPDYGVSWIRQPPGKGLEWIGVIWGSETTYYQSSLKSRVTISKDNSKNQVSLKLSSVTAADTAVYYCAKHYYYGGSYAMDYWGQGTLVTVSSTTTPAPRPPTPAPTIASQPLSLRPEACRPAAGGAVHTRGLDFACDIYIWAPLAGTCGVLLLSLVITLYCKRGRKKLLYIFKQPFMRPVQTTQEEDGCSCRFPEEEEGGCELRVKFSRSADAPAYQQGQNQLYNELNLGRREEYDVLDKRRGRDPEMGGKPRRKNPQEGLYNELQKDKMAEAYSEIGMKGERRRGKGHDGLYQGLSTATKDTYDALHMQALPPR

SEQ ID NO: 733 - DNA, 2232 bp, Artificial Sequence
  source: /note="Description of Artificial Sequence: Synthetic polynucleotide"
atggccctgcccgtgactgcgctcctgcttccgttggccctgctcctgcatgccgccagacctcagtccgctctgactcagccggcctcagcttcggggtcccctggtcaaagcgtcactatttcctgtaccggaacctcatcagacgtgggcggctacaattacgtgtcctggtaccaacagcaccccggaaaggctcctaagcttatgatctacgacgtgtccaaccggccgtcaggagtgtccaacagattctccggctccaagagcggaaacactgccagcttgaccattagcggcttgcaggccgaggacgaagccgactactactgctctagctacacatcctcgtctaccctctacgtgtttggaacggggacccagctgactgtgctcgggggtggaggatcagaggtgcaactccagcagtccggtcctggcctcgtgaaaccgtcccaaaccctgtccctgacttgcgccatctcgggcgactccatgctgtccaattccgacacctggaactggattagacaatcgcctagccggggactcgaatggctgggccggacctaccaccggtccacgtggtatgacgactacgcaagctccgtccggggaagggtgtccattaacgtcgatacctccaagaaccagtacagccttcagctgaacgctgtgacccccgaggataccggcgtctactactgtgcaagagtgcgattgcaggatggaaactcgtggtcggacgcattcgatgtctggggacagggaactatggtcactgtgtcctccggcggtggaggctcgggggggggcggctcaggaggaggcggctcacaagtccagctgcaagaatccggtccgggacttgtgaagccgtccgaaaccctgtcactgacttgcactgtgtccggggtgtcattgcccgactacggcgtgagctggattcggcagccccctggaaagggattggaatggatcggcgtgatctggggttcggaaactacctactatcagtcctcactgaagtcccgcgtgaccatcagcaaggataattccaaaaaccaagtgtctctgaagctctccagcgtcactgccgccgatactgccgtgtactactgcgccaagcactactattacggcggttcgtacgccatggactactggggacaaggcactcttgtgactgtgtcaagcggcggtggagggagcggtgggggcggttcaggaggaggcggatcagagatcgtgatgacccaatccccagccaccctgtccctcagccctggagaaagagccaccctgagctgccgggcctcccaggatatcagcaagtacttgaactggtaccaacaaaagccggggcaggcgccccggctcctgatctaccacacctcgcgcctccactcaggtatccccgccagattctcagggagcggctccggtactgactacaccctgactatttcctcactgcagccagaggactttgccgtgtacttctgccagcagggaaacactctgccgtacaccttcgggcagggaacgaagcttgaaattaagaccactaccccagcaccgaggccacccaccccggctcctaccatcgcctcccagcctctgtccctgcgtccggaggcatgtagacccgcagctggtggggccgtgcatacccggggtcttgacttcgcctgcgatatctacatttgggcccctctggctggtacttgcggggtcctgctgctttcactcgtgatcactctttactgtaagcgcggtcggaagaagctgctgtacatctttaagcaacccttcatgaggcctgtgcagactactcaagaggaggacggctgttcatgccggttcccagaggaggaggaaggcggctgcgaactgcgcgtgaaattcagccgcagcgcagatgctccagcctaccagcaggggcagaaccagctctacaacgaactcaatcttggtcggagagaggagtacgacgtgctggacaagcggagaggacgggacccagaaatgggcgggaagccgcgcagaaagaatccccaagagggcctgtacaacgagctccaaaaggataagatggcagaagcctatagcgagattggtatgaaaggggaacgcagaagaggcaaaggccacgacggactgtaccagggactcagcaccgccaccaaggacacctatgacgctcttcacatgcaggccctgccgcctcgg

SEQ ID NO: 734 - protein, 744 aa, Artificial Sequence
  source: /note="Description of Artificial Sequence: Synthetic polypeptide"
MALPVTALLLPLALLLHAARPQSALTQPASASGSPGQSVTISCTGTSSDVGGYNYVSWYQQHPGKAPKLMIYDVSNRPSGVSNRFSGSKSGNTASLTISGLQAEDEADYYCSSYTSSSTLYVFGTGTQLTVLGGGGSEVQLQQSGPGLVKPSQTLSLTCAISGDSMLSNSDTWNWIRQSPSRGLEWLGRTYHRSTWYDDYASSVRGRVSINVDTSKNQYSLQLNAVTPEDTGVYYCARVRLQDGNSWSDAFDVWGQGTMVTVSSGGGGSGGGGSGGGGSQVQLQESGPGLVKPSETLSLTCTVSGVSLPDYGVSWIRQPPGKGLEWIGVIWGSETTYYQSSLKSRVTISKDNSKNQVSLKLSSVTAADTAVYYCAKHYYYGGSYAMDYWGQGTLVTVSSGGGGSGGGGSGGGGSEIVMTQSPATLSLSPGERATLSCRASQDISKYLNWYQQKPGQAPRLLIYHTSRLHSGIPARFSGSGSGTDYTLTISSLQPEDFAVYFCQQGNTLPYTFGQGTKLEIKTTTPAPRPPTPAPTIASQPLSLRPEACRPAAGGAVHTRGLDFACDIYIWAPLAGTCGVLLLSLVITLYCKRGRKKLLYIFKQPFMRPVQTTQEEDGCSCRFPEEEEGGCELRVKFSRSADAPAYQQGQNQLYNELNLGRREEYDVLDKRRGRDPEMGGKPRRKNPQEGLYNELQKDKMAEAYSEIGMKGERRRGKGHDGLYQGLSTATKDTYDALHMQALPPR

SEQ ID NO: 735 - DNA, 2985 bp, Artificial Sequence
  source: /note="Description of Artificial Sequence: Synthetic polynucleotide"
atggccctccctgtcaccgccctgctgcttccgctggctcttctgctccacgccgctcggcccgaagtgcagctgcagcagtcagggcctggcctggtcaagccgtcgcagaccctctccctgacatgcgccattagcggggactccatgctgagcaactcggacacctggaactggattcggcagtccccttcccggggactcgagtggctcggacgcacctaccatcggagcacttggtacgacgactacgcctcctccgtgagaggtcgcgtgtcgatcaacgtggatacctcgaagaaccagtatagcttgcaactgaacgccgtgacccctgaggataccggagtgtactattgtgcgagagtcaggctgcaagacggaaactcctggtccgacgcatttgatgtctggggacagggtactatggtcacggtgtcatctggaggcggaggatcgcaaagcgccctgactcagccggcttcggctagcggttcaccggggcagtccgtgactatctcctgcaccgggacttcctccgacgtgggaggctacaattacgtgtcctggtaccagcaacaccccggcaaagccccaaagctgatgatctacgacgtcagcaacagacccagcggagtgtccaaccggttcagcggctccaagtccggcaacaccgcctccctgaccatcagcgggcttcaggccgaagatgaggcggattactactgctcctcgtacacctcaagctcaactctgtacgtgttcggcaccggtactcagctcaccgtgctgaccactaccccagcaccgaggccacccaccccggctcctaccatcgcctcccagcctctgtccctgcgtccggaggcatgtagacccgcagctggtggggccgtgcatacccggggtcttgacttcgcctgcgatatctacatttgggcccctctggctggtacttgcggggtcctgctgctttcactcgtgatcactctttactgtaagcgcggtcggaagaagctgctgtacatctttaagcaacccttcatgaggcctgtgcagactactcaagaggaggacggctgttcatgccggttcccagaggaggaggaaggcggctgcgaactgcgcgtgaaattcagccgcagcgcagatgctccagcctaccagcaggggcagaaccagctctacaacgaactcaatcttggtcggagagaggagtacgacgtgctggacaagcggagaggacgggacccagaaatgggcgggaagccgcgcagaaagaatccccaagagggcctgtacaacgagctccaaaaggataagatggcagaagcctatagcgagattggtatgaaaggggaacgcagaagaggcaaaggccacgacggactgtaccagggactcagcaccgccaccaaggacacctatgacgctcttcacatgcaggccctgccgcctcggggaagcggagctactaacttcagcctgctgaagcaggctggagacgtggaggagaaccctggacctatggccttaccagtgaccgccttgctcctgccgctggccttgctgctccacgccgccaggccggaaattgtgatgacccagtcacccgccactcttagcctttcacccggtgagcgcgcaaccctgtcttgcagagcctcccaagacatctcaaaataccttaattggtatcaacagaagcccggacaggctcctcgccttctgatctaccacaccagccggctccattctggaatccctgccaggttcagcggtagcggatctgggaccgactacaccctcactatcagctcactgcagccagaggacttcgctgtctatttctgtcagcaagggaacaccctgccctacacctttggacagggcaccaagctcgagattaaaggtggaggtggcagcggaggaggtgggtccggcggtggaggaagccaggtccaactccaagaaagcggaccgggtcttgtgaagccatcagaaactctttcactgacttgtactgtgagcggagtgtctctccccgattacggggtgtcttggatcagacagccaccggggaagggtctggaatggattggagtgatttggggctctgagactacttactaccaatcatccctcaagtcacgcgtcaccatctcaaaggacaactctaagaatcaggtgtcactgaaactgtcatctgtgaccgcagccgacaccgccgtgtactattgcgctaagcattactattatggcgggagctacgcaatggattactggggacagggtactctggtcaccgtgtccagcaccacgacgccagcgccgcgaccaccaacaccggcgcccaccatcgcgtcgcagcccctgtccctgcgcccagaggcgtgccggccagcggcggggggcgcagtgcacacgagggggctggacttcgcctgtgatatctacatctgggcgcccttggccgggacttgtggggtccttctcctgtcactggttatcaccctttactgcaaacggggcagaaagaaactcctgtatatattcaaacaaccatttatgagaccagtacaaactactcaagaggaagatggctgtagctgccgatttccagaagaagaagaaggaggatgtgaactgagagtgaagttcagcaggagcgcagacgcccccgcgtaccagcagggccagaaccagctctataacgagctcaatctaggacgaagagaggagtacgatgttttggacaagagacgtggccgggaccctgagatggggggaaagccgagaaggaagaaccctcaggaaggcctgtacaatgaactgcagaaagataagatggcggaggcctacagtgagattgggatgaaaggcgagcgccggaggggcaaggggcacgatggcctttaccagggtctcagtacagccaccaaggacacctacgacgcccttcacatgcaggccctgccccctcgc

SEQ ID NO: 736 - protein, 995 aa, Artificial Sequence
  source: /note="Description of Artificial Sequence: Synthetic polypeptide"
MALPVTALLLPLALLLHAARPEVQLQQSGPGLVKPSQTLSLTCAISGDSMLSNSDTWNWIRQSPSRGLEWLGRTYHRSTWYDDYASSVRGRVSINVDTSKNQYSLQLNAVTPEDTGVYYCARVRLQDGNSWSDAFDVWGQGTMVTVSSGGGGSQSALTQPASASGSPGQSVTISCTGTSSDVGGYNYVSWYQQHPGKAPKLMIYDVSNRPSGVSNRFSGSKSGNTASLTISGLQAEDEADYYCSSYTSSSTLYVFGTGTQLTVLTTTPAPRPPTPAPTIASQPLSLRPEACRPAAGGAVHTRGLDFACDIYIWAPLAGTCGVLLLSLVITLYCKRGRKKLLYIFKQPFMRPVQTTQEEDGCSCRFPEEEEGGCELRVKFSRSADAPAYQQGQNQLYNELNLGRREEYDVLDKRRGRDPEMGGKPRRKNPQEGLYNELQKDKMAEAYSEIGMKGERRRGKGHDGLYQGLSTATKDTYDALHMQALPPRGSGATNFSLLKQAGDVEENPGPMALPVTALLLPLALLLHAARPEIVMTQSPATLSLSPGERATLSCRASQDISKYLNWYQQKPGQAPRLLIYHTSRLHSGIPARFSGSGSGTDYTLTISSLQPEDFAVYFCQQGNTLPYTFGQGTKLEIKGGGGSGGGGSGGGGSQVQLQESGPGLVKPSETLSLTCTVSGVSLPDYGVSWIRQPPGKGLEWIGVIWGSETTYYQSSLKSRVTISKDNSKNQVSLKLSSVTAADTAVYYCAKHYYYGGSYAMDYWGQGTLVTVSSTTTPAPRPPTPAPTIASQPLSLRPEACRPAAGGAVHTRGLDFACDIYIWAPLAGTCGVLLLSLVITLYCKRGRKKLLYIFKQPFMRPVQTTQEEDGCSCRFPEEEEGGCELRVKFSRSADAPAYQQGQNQLYNELNLGRREEYDVLDKRRGRDPEMGGKPRRKNPQEGLYNELQKDKMAEAYSEIGMKGERRRGKGHDGLYQGLSTATKDTYDALHMQALPPR

SEQ ID NO: 737 - protein, 508 aa, Artificial Sequence
  source: /note="Description of Artificial Sequence: Synthetic polypeptide"
MALPVTALLLPLALLLHAARPEVQLQQSGPGLVKPSQTLSLTCAISGDSMLSNSDTWNWIRQSPSRGLEWLGRTYHRSTWYDDYASSVRGRVSINVDTSKNQYSLQLNAVTPEDTGVYYCARVRLQDGNSWSDAFDVWGQGTMVTVSSGGGGSQSALTQPASASGSPGQSVTISCTGTSSDVGGYNYVSWYQQHPGKAPKLMIYDVSNRPSGVSNRFSGSKSGNTASLTISGLQAEDEADYYCSSYTSSSTLYVFGTGTQLTVLTTTPAPRPPTPAPTIASQPLSLRPEACRPAAGGAVHTRGLDFACDIYIWAPLAGTCGVLLLSLVITLYCKRGRKKLLYIFKQPFMRPVQTTQEEDGCSCRFPEEEEGGCELRVKFSRSADAPAYQQGQNQLYNELNLGRREEYDVLDKRRGRDPEMGGKPRRKNPQEGLYNELQKDKMAEAYSEIGMKGERRRGKGHDGLYQGLSTATKDTYDALHMQALPPRGSGATNFSLLKQAGDVEENPG

SEQ ID NO: 738 - protein, 487 aa, Artificial Sequence
  source: /note="Description of Artificial Sequence: Synthetic polypeptide"
PMALPVTALLLPLALLLHAARPEIVMTQSPATLSLSPGERATLSCRASQDISKYLNWYQQKPGQAPRLLIYHTSRLHSGIPARFSGSGSGTDYTLTISSLQPEDFAVYFCQQGNTLPYTFGQGTKLEIKGGGGSGGGGSGGGGSQVQLQESGPGLVKPSETLSLTCTVSGVSLPDYGVSWIRQPPGKGLEWIGVIWGSETTYYQSSLKSRVTISKDNSKNQVSLKLSSVTAADTAVYYCAKHYYYGGSYAMDYWGQGTLVTVSSTTTPAPRPPTPAPTIASQPLSLRPEACRPAAGGAVHTRGLDFACDIYIWAPLAGTCGVLLLSLVITLYCKRGRKKLLYIFKQPFMRPVQTTQEEDGCSCRFPEEEEGGCELRVKFSRSADAPAYQQGQNQLYNELNLGRREEYDVLDKRRGRDPEMGGKPRRKNPQEGLYNELQKDKMAEAYSEIGMKGERRRGKGHDGLYQGLSTATKDTYDALHMQALPPR

SEQ ID NO: 739 - DNA, 2985 bp, Artificial Sequence
  source: /note="Description of Artificial Sequence: Synthetic polynucleotide"
atggccttaccagtgaccgccttgctcctgccgctggccttgctgctccacgccgccaggccggaaattgtgatgacccagtcacccgccactcttagcctttcacccggtgagcgcgcaaccctgtcttgcagagcctcccaagacatctcaaaataccttaattggtatcaacagaagcccggacaggctcctcgccttctgatctaccacaccagccggctccattctggaatccctgccaggttcagcggtagcggatctgggaccgactacaccctcactatcagctcactgcagccagaggacttcgctgtctatttctgtcagcaagggaacaccctgccctacacctttggacagggcaccaagctcgagattaaaggtggaggtggcagcggaggaggtgggtccggcggtggaggaagccaggtccaactccaagaaagcggaccgggtcttgtgaagccatcagaaactctttcactgacttgtactgtgagcggagtgtctctccccgattacggggtgtcttggatcagacagccaccggggaagggtctggaatggattggagtgatttggggctctgagactacttactaccaatcatccctcaagtcacgcgtcaccatctcaaaggacaactctaagaatcaggtgtcactgaaactgtcatctgtgaccgcagccgacaccgccgtgtactattgcgctaagcattactattatggcgggagctacgcaatggattactggggacagggtactctggtcaccgtgtccagcaccacgacgccagcgccgcgaccaccaacaccggcgcccaccatcgcgtcgcagcccctgtccctgcgcccagaggcgtgccggccagcggcggggggcgcagtgcacacgagggggctggacttcgcctgtgatatctacatctgggcgcccttggccgggacttgtggggtccttctcctgtcactggttatcaccctttactgcaaacggggcagaaagaaactcctgtatatattcaaacaaccatttatgagaccagtacaaactactcaagaggaagatggctgtagctgccgatttccagaagaagaagaaggaggatgtgaactgagagtgaagttcagcaggagcgcagacgcccccgcgtaccagcagggccagaaccagctctataacgagctcaatctaggacgaagagaggagtacgatgttttggacaagagacgtggccgggaccctgagatggggggaaagccgagaaggaagaaccctcaggaaggcctgtacaatgaactgcagaaagataagatggcggaggcctacagtgagattgggatgaaaggcgagcgccggaggggcaaggggcacgatggcctttaccagggtctcagtacagccaccaaggacacctacgacgcccttcacatgcaggccctgccccctcgcggaagcggagctactaacttcagcctgctgaagcaggctggagacgtggaggagaaccctggacctatggccctccctgtcaccgccctgctgcttccgctggctcttctgctccacgccgctcggcccgaagtgcagctgcagcagtcagggcctggcctggtcaagccgtcgcagaccctctccctgacatgcgccattagcggggactccatgctgagcaactcggacacctggaactggattcggcagtccccttcccggggactcgagtggctcggacgcacctaccatcggagcacttggtacgacgactacgcctcctccgtgagaggtcgcgtgtcgatcaacgtggatacctcgaagaaccagtatagcttgcaactgaacgccgtgacccctgaggataccggagtgtactattgtgcgagagtcaggctgcaagacggaaactcctggtccgacgcatttgatgtctggggacagggtactatggtcacggtgtcatctggaggcggaggatcgcaaagcgccctgactcagccggcttcggctagcggttcaccggggcagtccgtgactatctcctgcaccgggacttcctccgacgtgggaggctacaattacgtgtcctggtaccagcaacaccccggcaaagccccaaagctgatgatctacgacgtcagcaacagacccagcggagtgtccaaccggttcagcggctccaagtccggcaacaccgcctccctgaccatcagcgggcttcaggccgaagatgaggcggattactactgctcctcgtacacctcaagctcaactctgtacgtgttcggcaccggtactcagctcaccgtgctgaccactaccccagcaccgaggccacccaccccggctcctaccatcgcctcccagcctctgtccctgcgtccggaggcatgtagacccgcagctggtggggccgtgcatacccggggtcttgacttcgcctgcgatatctacatttgggcccctctggctggtacttgcggggtcctgctgctttcactcgtgatcactctttactgtaagcgcggtcggaagaagctgctgtacatctttaagcaacccttcatgaggcctgtgcagactactcaagaggaggacggctgttcatgccggttcccagaggaggaggaaggcggctgcgaactgcgcgtgaaattcagccgcagcgcagatgctccagcctaccagcaggggcagaaccagctctacaacgaactcaatcttggtcggagagaggagtacgacgtgctggacaagcggagaggacgggacccagaaatgggcgggaagccgcgcagaaagaatccccaagagggcctgtacaacgagctccaaaaggataagatggcagaagcctatagcgagattggtatgaaaggggaacgcagaagaggcaaaggccacgacggactgtaccagggactcagcaccgccaccaaggacacctatgacgctcttcacatgcaggccctgccgcctcgg

SEQ ID NO: 740 - protein, 995 aa, Artificial Sequence
  source: /note="Description of Artificial Sequence: Synthetic polypeptide"
MALPVTALLLPLALLLHAARPEIVMTQSPATLSLSPGERATLSCRASQDISKYLNWYQQKPGQAPRLLIYHTSRLHSGIPARFSGSGSGTDYTLTISSLQPEDFAVYFCQQGNTLPYTFGQGTKLEIKGGGGSGGGGSGGGGSQVQLQESGPGLVKPSETLSLTCTVSGVSLPDYGVSWIRQPPGKGLEWIGVIWGSETTYYQSSLKSRVTISKDNSKNQVSLKLSSVTAADTAVYYCAKHYYYGGSYAMDYWGQGTLVTVSSTTTPAPRPPTPAPTIASQPLSLRPEACRPAAGGAVHTRGLDFACDIYIWAPLAGTCGVLLLSLVITLYCKRGRKKLLYIFKQPFMRPVQTTQEEDGCSCRFPEEEEGGCELRVKFSRSADAPAYQQGQNQLYNELNLGRREEYDVLDKRRGRDPEMGGKPRRKNPQEGLYNELQKDKMAEAYSEIGMKGERRRGKGHDGLYQGLSTATKDTYDALHMQALPPRGSGATNFSLLKQAGDVEENPGPMALPVTALLLPLALLLHAARPEVQLQQSGPGLVKPSQTLSLTCAISGDSMLSNSDTWNWIRQSPSRGLEWLGRTYHRSTWYDDYASSVRGRVSINVDTSKNQYSLQLNAVTPEDTGVYYCARVRLQDGNSWSDAFDVWGQGTMVTVSSGGGGSQSALTQPASASGSPGQSVTISCTGTSSDVGGYNYVSWYQQHPGKAPKLMIYDVSNRPSGVSNRFSGSKSGNTASLTISGLQAEDEADYYCSSYTSSSTLYVFGTGTQLTVLTTTPAPRPPTPAPTIASQPLSLRPEACRPAAGGAVHTRGLDFACDIYIWAPLAGTCGVLLLSLVITLYCKRGRKKLLYIFKQPFMRPVQTTQEEDGCSCRFPEEEEGGCELRVKFSRSADAPAYQQGQNQLYNELNLGRREEYDVLDKRRGRDPEMGGKPRRKNPQEGLYNELQKDKMAEAYSEIGMKGERRRGKGHDGLYQGLSTATKDTYDALHMQALPPR

SEQ ID NO: 741 - protein, 507 aa, Artificial Sequence
  source: /note="Description of Artificial Sequence: Synthetic polypeptide"
MALPVTALLLPLALLLHAARPEIVMTQSPATLSLSPGERATLSCRASQDISKYLNWYQQKPGQAPRLLIYHTSRLHSGIPARFSGSGSGTDYTLTISSLQPEDFAVYFCQQGNTLPYTFGQGTKLEIKGGGGSGGGGSGGGGSQVQLQESGPGLVKPSETLSLTCTVSGVSLPDYGVSWIRQPPGKGLEWIGVIWGSETTYYQSSLKSRVTISKDNSKNQVSLKLSSVTAADTAVYYCAKHYYYGGSYAMDYWGQGTLVTVSSTTTPAPRPPTPAPTIASQPLSLRPEACRPAAGGAVHTRGLDFACDIYIWAPLAGTCGVLLLSLVITLYCKRGRKKLLYIFKQPFMRPVQTTQEEDGCSCRFPEEEEGGCELRVKFSRSADAPAYQQGQNQLYNELNLGRREEYDVLDKRRGRDPEMGGKPRRKNPQEGLYNELQKDKMAEAYSEIGMKGERRRGKGHDGLYQGLSTATKDTYDALHMQALPPRGSGATNFSLLKQAGDVEENPG

SEQ ID NO: 742 - protein, 488 aa, Artificial Sequence
  source: /note="Description of Artificial Sequence: Synthetic polypeptide"
PMALPVTALLLPLALLLHAARPEVQLQQSGPGLVKPSQTLSLTCAISGDSMLSNSDTWNWIRQSPSRGLEWLGRTYHRSTWYDDYASSVRGRVSINVDTSKNQYSLQLNAVTPEDTGVYYCARVRLQDGNSWSDAFDVWGQGTMVTVSSGGGGSQSALTQPASASGSPGQSVTISCTGTSSDVGGYNYVSWYQQHPGKAPKLMIYDVSNRPSGVSNRFSGSKSGNTASLTISGLQAEDEADYYCSSYTSSSTLYVFGTGTQLTVLTTTPAPRPPTPAPTIASQPLSLRPEACRPAAGGAVHTRGLDFACDIYIWAPLAGTCGVLLLSLVITLYCKRGRKKLLYIFKQPFMRPVQTTQEEDGCSCRFPEEEEGGCELRVKFSRSADAPAYQQGQNQLYNELNLGRREEYDVLDKRRGRDPEMGGKPRRKNPQEGLYNELQKDKMAEAYSEIGMKGERRRGKGHDGLYQGLSTATKDTYDALHMQALPPR

SEQ ID NO: 743 - DNA, 2985 bp, Artificial Sequence
  source: /note="Description of Artificial Sequence: Synthetic polynucleotide"
atggcacttcccgtcaccgccctgctgctcccactcgccctccttctgcacgccgcccgccccgaagtgcagctgcagcagtcaggaccgggcctggtcaaaccttcgcagactctgtccctgacttgcgctataagcggggactccatgctgagcaattcggacacttggaactggattcgccaaagccccagccggggtctggaatggctgggaaggacctaccatcgctctacttggtacgacgactacgccagctccgtgcgaggacgcgtgtccatcaacgtggacacctccaagaaccagtactcgcttcaactcaacgcagtgacccctgaagataccggagtctactattgcgcccgcgtgcggctccaggacgggaactcctggtcggacgctttcgatgtctggggacagggcactatggtcaccgtcagctccggcggcggcggtagccaatcggcgctgacacagccggcttccgcctcgggatcgcctggacagtcggtgaccatctcgtgcactggaacctcctccgacgtgggcggctacaattatgtgtcatggtaccagcagcacccgggaaaggcccctaagctgatgatctacgacgtgtccaatagacctagcggggtgtcaaacagattctccggatccaaatccggaaacactgcctccctgaccatttccggactgcaggccgaggacgaagccgattactactgctcctcttacacctcctcatccaccctctacgtgtttgggactgggacccagctgaccgtcctcactaccaccccggccccgcggccccctacaccggcaccgactattgccagccagcctctctcgctgcggccggaggcctgccgcccagccgccggcggagccgtgcacacccgcggtctggacttcgcgtgcgatatctacatctgggctccgctggccgggacttgtggcgtgctgctgctgtctctggtcatcacactgtactgcaagcgcggaagaaagaagctgctctacatcttcaagcaacccttcatgcggcctgtgcagaccacccaggaagaggatggctgctcctgccggttcccggaggaagaagagggcggatgcgaactgcgcgtgaagttcagccgaagcgccgacgccccggcctaccagcagggccagaaccaactgtacaacgaactcaacctgggtcggagagaagagtacgacgtgctggacaaaagacgcggcagggaccccgagatgggcggaaagcctcgccgcaagaacccgcaggagggcctctacaacgagctgcagaaggacaagatggccgaagcctactcagagatcggcatgaagggggagcggaggcgcgggaagggccacgacggtttgtaccaaggactttccactgcgaccaaggacacctacgatgccctccatatgcaagccctgccgccccggggttccggagctaccaacttctcgctgttgaagcaggccggagatgtcgaggaaaacccgggacctatggccctgccagtgaccgcgctcctgctgcccctggctctgctgcttcacgcggcccggcctgagattgtgatgactcagagcccggcgaccctgtccctgtcccccggggagagagcaaccctgtcgtgccgggcctcccaagacatctcaaagtacctcaattggtatcagcagaagccaggacaggctccacggttgctgatctaccacacttcgagactgcactcaggaatccccgcgcggttttccggttccggctccgggaccgactacaccctgaccatcagctcgctccagcctgaggatttcgcagtgtacttctgtcagcaaggaaacacccttccatacaccttcggacagggtaccaagctggaaatcaagggaggaggaggatctgggggcggtggttccggaggcggtggaagccaagtgcagctccaggaaagcggacccgggctggtcaagccgagcgaaaccctctcactgacttgtactgtgtccggagtgtccctgcctgactatggagtgtcctggatccgacagccccccggaaagggtctggagtggattggggtcatctggggctccgaaactacctactaccagagcagcctcaagagccgggtcaccatttcaaaggataactccaagaatcaagtgtccctgaagctgtcctcagtgacagccgcagacaccgccgtgtactactgcgccaagcactactactacggaggctcctacgcaatggactactggggacaaggcactttggtcactgtgtcaagcaccaccacccctgcgcctcggcctcctaccccggctcccactatcgcgagccagccgctgagcctgcggcctgaggcttgccgaccggccgctggcggcgccgtgcatactcggggcctcgactttgcctgtgacatctacatctgggcccccctggccggaacgtgcggagtgctgctgctgtcgctggtcattaccctgtattgcaaacgcggaaggaagaagctgttgtacattttcaagcagcccttcatgcgcccggtgcaaactactcaggaggaagatggctgttcctgtcggttccccgaagaggaagaaggcggctgcgagttgagggtcaagttctcccggtccgccgatgctcccgcctaccaacaggggcagaaccagctttataacgaactgaacctgggcaggagggaggaatatgatgtgttggataagcgccggggccgggacccagaaatggggggaaagcccagaagaaagaaccctcaagagggactttacaacgaattgcagaaagacaaaatggccgaggcctactccgagattgggatgaagggcgaaagacggagaggaaaggggcacgacgggctctaccagggactcagcaccgccaccaaagatacctacgacgccctgcatatgcaggcgctgccgccgcgc

SEQ ID NO: 744 - protein, 9 aa, Artificial Sequence
  source: /note="Description of Artificial Sequence: Synthetic peptide"
GDSMLSNSD

SEQ ID NO: 745 - protein, 7 aa, Artificial Sequence
  source: /note="Description of Artificial Sequence: Synthetic peptide"
YHRSTWY

SEQ ID NO: 746 - protein, 10 aa, Artificial Sequence
  source: /note="Description of Artificial Sequence: Synthetic peptide"
GDSMLSNSDT

SEQ ID NO: 747 - protein, 9 aa, Artificial Sequence
  source: /note="Description of Artificial Sequence: Synthetic peptide"
TYHRSTWYD

SEQ ID NO: 748 - protein, 17 aa, Artificial Sequence
  source: /note="Description of Artificial Sequence: Synthetic peptide"
ARVRLQDGNSWSDAFDV

SEQ ID NO: 749 - protein, 10 aa, Artificial Sequence
  source: /note="Description of Artificial Sequence: Synthetic peptide"
GVSLPDYGVS

SEQ ID NO: 750 - protein, 16 aa, Artificial Sequence
  source: /note="Description of Artificial Sequence: Synthetic peptide"
VIWGSETTYYSSSLKS

SEQ ID NO: 751 - protein, 16 aa, Artificial Sequence
  source: /note="Description of Artificial Sequence: Synthetic peptide"
VIWGSETTYYNSSLKS

SEQ ID NO: 752 - DNA, 726 bp, Artificial Sequence
  source: /note="Description of Artificial Sequence: Synthetic polynucleotide"
gaaattgtgatgacccagtcacccgccactcttagcctttcacccggtgagcgcgcaaccctgtcttgcagagcctcccaagacatctcaaaataccttaattggtatcaacagaagcccggacaggctcctcgccttctgatctaccacaccagccggctccattctggaatccctgccaggttcagcggtagcggatctgggaccgactacaccctcactatcagctcactgcagccagaggacttcgctgtctatttctgtcagcaagggaacaccctgccctacacctttggacagggcaccaagctcgagattaaaggtggaggtggcagcggaggaggtgggtccggcggtggaggaagccaggtccaactccaagaaagcggaccgggtcttgtgaagccatcagaaactctttcactgacttgtactgtgagcggagtgtctctccccgattacggggtgtcttggatcagacagccaccggggaagggtctggaatggattggagtgatttggggctctgagactacttactaccaatcatccctcaagtcacgcgtcaccatctcaaaggacaactctaagaatcaggtgtcactgaaactgtcatctgtgaccgcagccgacaccgccgtgtactattgcgctaagcattactattatggcgggagctacgcaatggattactggggacagggtactctggtcaccgtgtccagc

SEQ ID NO: 753 - DNA, 726 bp, Artificial Sequence
  source: /note="Description of Artificial Sequence: Synthetic polynucleotide"
gagattgtcatgactcagtccccggccacactctccctgtcacccggagaaagagcaaccctgagctgcagggcgtcccaggacatctcgaagtacctgaactggtaccagcagaagcctggacaagcaccccgcctcctgatctaccacacctcgcggctgcattcgggaatccccgccagattctcagggagcggatcaggaaccgactacaccctgactatctcgagcctgcaaccagaggatttcgccgtgtacttctgccagcaaggaaacaccctgccctacacctttggacagggaaccaagctcgagattaaggggggtggtggatcgggagggggtggatcaggaggaggcggctcacaagtccagctgcaagaatccggtccgggacttgtgaagccgtccgaaaccctgtcactgacttgcactgtgtccggggtgtcattgcccgactacggcgtgagctggattcggcagccccctggaaagggattggaatggatcggcgtgatctggggttcggaaactacctactatcagtcctcactgaagtcccgcgtgaccatcagcaaggataattccaaaaaccaagtgtctctgaagctctccagcgtcactgccgccgatactgccgtgtactactgcgccaagcactactattacggcggttcgtacgccatggactactggggccaagggacactcgtgaccgtgtcatcc

SEQ ID NO: 754 - DNA, 726 bp, Artificial Sequence
  source: /note="Description of Artificial Sequence: Synthetic polynucleotide"
caagtccagctgcaagaatccggtccgggacttgtgaagccgtccgaaaccctgtcactgacttgcactgtgtccggggtgtcattgcccgactacggcgtgagctggattcggcagccccctggaaagggattggaatggatcggcgtgatctggggttcggaaactacctactatcagtcctcactgaagtcccgcgtgaccatcagcaaggataattccaaaaaccaagtgtctctgaagctctccagcgtcactgccgccgatactgccgtgtactactgcgccaagcactactattacggcggttcgtacgccatggactactggggacaaggcactcttgtgactgtgtcaagcggcggtggagggagcggtgggggcggttcaggaggaggcggatcagagatcgtgatgacccaatccccagccaccctgtccctcagccctggagaaagagccaccctgagctgccgggcctcccaggatatcagcaagtacttgaactggtaccaacaaaagccggggcaggcgccccggctcctgatctaccacacctcgcgcctccactcaggtatccccgccagattctcagggagcggctccggtactgactacaccctgactatttcctcactgcagccagaggactttgccgtgtacttctgccagcagggaaacactctgccgtacaccttcgggcagggaacgaagcttgaaattaag

SEQ ID NO: 755 - protein, 242 aa, Artificial Sequence
  source: /note="Description of Artificial Sequence: Synthetic polypeptide"
QVQLQESGPGLVKPSETLSLTCTVSGVSLPDYGVSWIRQPPGKGLEWIGVIWGSETTYYQSSLKSRVTISKDNSKNQVSLKLSSVTAADTAVYYCAKHYYYGGSYAMDYWGQGTLVTVSSGGGGSGGGGSGGGGSEIVMTQSPATLSLSPGERATLSCRASQDISKYLNWYQQKPGQAPRLLIYHTSRLHSGIPARFSGSGSGTDYTLTISSLQPEDFAVYFCQQGNTLPYTFGQGTKLEIK

SEQ ID NO: 756 - DNA, 726 bp, Artificial Sequence
  source: /note="Description of Artificial Sequence: Synthetic polynucleotide"
gagattgtgatgactcagagcccggcgaccctgtccctgtcccccggggagagagcaaccctgtcgtgccgggcctcccaagacatctcaaagtacctcaattggtatcagcagaagccaggacaggctccacggttgctgatctaccacacttcgagactgcactcaggaatccccgcgcggttttccggttccggctccgggaccgactacaccctgaccatcagctcgctccagcctgaggatttcgcagtgtacttctgtcagcaaggaaacacccttccatacaccttcggacagggtaccaagctggaaatcaagggaggaggaggatctgggggcggtggttccggaggcggtggaagccaagtgcagctccaggaaagcggacccgggctggtcaagccgagcgaaaccctctcactgacttgtactgtgtccggagtgtccctgcctgactatggagtgtcctggatccgacagccccccggaaagggtctggagtggattggggtcatctggggctccgaaactacctactaccagagcagcctcaagagccgggtcaccatttcaaaggataactccaagaatcaagtgtccctgaagctgtcctcagtgacagccgcagacaccgccgtgtactactgcgccaagcactactactacggaggctcctacgcaatggactactggggacaaggcactttggtcactgtgtcaagc

SEQ ID NO: 757 - DNA, 729 bp, Artificial Sequence
  source: /note="Description of Artificial Sequence: Synthetic polynucleotide"
gaagtgcagctgcagcagtcagggcctggcctggtcaagccgtcgcagaccctctccctgacatgcgccattagcggggactccatgctgagcaactcggacacctggaactggattcggcagtccccttcccggggactcgagtggctcggacgcacctaccatcggagcacttggtacgacgactacgcctcctccgtgagaggtcgcgtgtcgatcaacgtggatacctcgaagaaccagtatagcttgcaactgaacgccgtgacccctgaggataccggagtgtactattgtgcgagagtcaggctgcaagacggaaactcctggtccgacgcatttgatgtctggggacagggtactatggtcacggtgtcatctggaggcggaggatcgcaaagcgccctgactcagccggcttcggctagcggttcaccggggcagtccgtgactatctcctgcaccgggacttcctccgacgtgggaggctacaattacgtgtcctggtaccagcaacaccccggcaaagccccaaagctgatgatctacgacgtcagcaacagacccagcggagtgtccaaccggttcagcggctccaagtccggcaacaccgcctccctgaccatcagcgggcttcaggccgaagatgaggcggattactactgctcctcgtacacctcaagctcaactctgtacgtgttcggcaccggtactcagctcaccgtgctg

SEQ ID NO: 758 - protein, 243 aa, Artificial Sequence
  source: /note="Description of Artificial Sequence: Synthetic polypeptide"
EVQLQQSGPGLVKPSQTLSLTCAISGDSMLSNSDTWNWIRQSPSRGLEWLGRTYHRSTWYDDYASSVRGRVSINVDTSKNQYSLQLNAVTPEDTGVYYCARVRLQDGNSWSDAFDVWGQGTMVTVSSGGGGSQSALTQPASASGSPGQSVTISCTGTSSDVGGYNYVSWYQQHPGKAPKLMIYDVSNRPSGVSNRFSGSKSGNTASLTISGLQAEDEADYYCSSYTSSSTLYVFGTGTQLTVL

SEQ ID NO: 759 - DNA, 729 bp, Artificial Sequence
  source: /note="Description of Artificial Sequence: Synthetic polynucleotide"
gaagtgcagctgcagcagtcaggaccgggcctggtcaaaccttcgcagactctgtccctgacttgcgctataagcggggactccatgctgagcaattcggacacttggaactggattcgccaaagccccagccggggtctggaatggctgggaaggacctaccatcgctctacttggtacgacgactacgccagctccgtgcgaggacgcgtgtccatcaacgtggacacctccaagaaccagtactcgcttcaactcaacgcagtgacccctgaagataccggagtctactattgcgcccgcgtgcggctccaggacgggaactcctggtcggacgctttcgatgtctggggacagggcactatggtcaccgtcagctccggcggcggcggtagccaatcggcgctgacacagccggcttccgcctcgggatcgcctggacagtcggtgaccatctcgtgcactggaacctcctccgacgtgggcggctacaattatgtgtcatggtaccagcagcacccgggaaaggcccctaagctgatgatctacgacgtgtccaatagacctagcggggtgtcaaacagattctccggatccaaatccggaaacactgcctccctgaccatttccggactgcaggccgaggacgaagccgattactactgctcctcttacacctcctcatccaccctctacgtgtttgggactgggacccagctgaccgtcctc

SEQ ID NO: 760 - DNA, 759 bp, Artificial Sequence
  source: /note="Description of Artificial Sequence: Synthetic polynucleotide"
gaagtgcagcttcaacaatcaggaccaggactcgtcaaaccatcacagaccctctccctcacatgtgccatctccggggactccatgttgagcaattccgacacttggaattggattagacaaagcccgtcccggggtctggaatggttgggacgcacctaccaccggtctacttggtacgacgactacgcgtcatccgtgcggggaagagtgtccatcaacgtggacacctccaagaaccagtacagcctgcagcttaatgccgtgactcctgaggatacgggcgtctactactgcgcccgcgtccgcctgcaagacgggaacagctggagcgatgcattcgatgtctggggccagggaactatggtcaccgtgtcgtctgggggcggtggatcgggtggcgggggttcggggggcggcggctctcagtccgctcttacccaaccggcctcagcctcggggagccccggccagagcgtgaccatttcctgcaccggcacttcatccgacgtgggcggctacaactacgtgtcctggtaccaacagcacccgggaaaggcccccaagctcatgatctacgacgtgtccaacaggccctcgggagtgtccaaccggttctcgggttcgaaatcgggaaacacagccagcctgaccatcagcggactgcaggctgaagatgaagccgactactactgctcctcctacacctcgtcatccacgctctacgtgttcggcactggaactcagctgactgtgctg

SEQ ID NO: 761 - DNA, 729 bp, Artificial Sequence
  source: /note="Description of Artificial Sequence: Synthetic polynucleotide"
cagtccgctcttacccaaccggcctcagcctcggggagccccggccagagcgtgaccatttcctgcaccggcacttcatccgacgtgggcggctacaactacgtgtcctggtaccaacagcacccgggaaaggcccccaagctcatgatctacgacgtgtccaacaggccctcgggagtgtccaaccggttctcgggttcgaaatcgggaaacacagccagcctgaccatcagcggactgcaggctgaagatgaagccgactactactgctcctcctacacctcgtcatccacgctctacgtgttcggcactggaactcagctgactgtgctgggcggaggaggctccgaagtgcagcttcaacaatcaggaccaggactcgtcaaaccatcacagaccctctccctcacatgtgccatctccggggactccatgttgagcaattccgacacttggaattggattagacaaagcccgtcccggggtctggaatggttgggacgcacctaccaccggtctacttggtacgacgactacgcgtcatccgtgcggggaagagtgtccatcaacgtggacacctccaagaaccagtacagcctgcagcttaatgccgtgactcctgaggatacgggcgtctactactgcgcccgcgtccgcctgcaagacgggaacagctggagcgatgcattcgatgtctggggccagggaactatggtcaccgtgtcgtct

SEQ ID NO: 762 - protein, 243 aa, Artificial Sequence
  source: /note="Description of Artificial Sequence: Synthetic polypeptide"
QSALTQPASASGSPGQSVTISCTGTSSDVGGYNYVSWYQQHPGKAPKLMIYDVSNRPSGVSNRFSGSKSGNTASLTISGLQAEDEADYYCSSYTSSSTLYVFGTGTQLTVLGGGGSEVQLQQSGPGLVKPSQTLSLTCAISGDSMLSNSDTWNWIRQSPSRGLEWLGRTYHRSTWYDDYASSVRGRVSINVDTSKNQYSLQLNAVTPEDTGVYYCARVRLQDGNSWSDAFDVWGQGTMVTVSS

SEQ ID NO: 763 - DNA, 729 bp, Artificial Sequence
  source: /note="Description of Artificial Sequence: Synthetic polynucleotide"
cagtccgctctgactcagccggcctcagcttcggggtcccctggtcaaagcgtcactatttcctgtaccggaacctcatcagacgtgggcggctacaattacgtgtcctggtaccaacagcaccccggaaaggctcctaagcttatgatctacgacgtgtccaaccggccgtcaggagtgtccaacagattctccggctccaagagcggaaacactgccagcttgaccattagcggcttgcaggccgaggacgaagccgactactactgctctagctacacatcctcgtctaccctctacgtgtttggaacggggacccagctgactgtgctcgggggtggaggatcagaggtgcaactccagcagtccggtcctggcctcgtgaaaccgtcccaaaccctgtccctgacttgcgccatctcgggcgactccatgctgtccaattccgacacctggaactggattagacaatcgcctagccggggactcgaatggctgggccggacctaccaccggtccacgtggtatgacgactacgcaagctccgtccggggaagggtgtccattaacgtcgatacctccaagaaccagtacagccttcagctgaacgctgtgacccccgaggataccggcgtctactactgtgcaagagtgcgattgcaggatggaaactcgtggtcggacgcattcgatgtctggggacagggaactatggtgaccgtgtcctcg

SEQ ID NO: 764 - DNA, 729 bp, Artificial Sequence
  source: /note="Description of Artificial Sequence: Synthetic polynucleotide"
cagtccgctctgactcagccggcctcagcttcggggtcccctggtcaaagcgtcactatttcctgtaccggaacctcatcagacgtgggcggctacaattacgtgtcctggtaccaacagcaccccggaaaggctcctaagcttatgatctacgacgtgtccaaccggccgtcaggagtgtccaacagattctccggctccaagagcggaaacactgccagcttgaccattagcggcttgcaggccgaggacgaagccgactactactgctctagctacacatcctcgtctaccctctacgtgtttggaacggggacccagctgactgtgctcgggggtggaggatcagaggtgcaactccagcagtccggtcctggcctcgtgaaaccgtcccaaaccctgtccctgacttgcgccatctcgggcgactccatgctgtccaattccgacacctggaactggattagacaatcgcctagccggggactcgaatggctgggccggacctaccaccggtccacgtggtatgacgactacgcaagctccgtccggggaagggtgtccattaacgtcgatacctccaagaaccagtacagccttcagctgaacgctgtgacccccgaggataccggcgtctactactgtgcaagagtgcgattgcaggatggaaactcgtggtcggacgcattcgatgtctggggacagggaactatggtcactgtgtcctcc

SEQ ID NO: 765 - DNA, 63 bp, Artificial Sequence
  source: /note="Description of Artificial Sequence: Synthetic oligonucleotide"
atggccctgcccgtgactgcgctcctgcttccgttggccctgctcctgcatgccgccagacct

SEQ ID NO: 766 - DNA, 63 bp, Artificial Sequence
  source: /note="Description of Artificial Sequence: Synthetic oligonucleotide"
atggccttaccagtgaccgccttgctcctgccgctggccttgctgctccacgccgccaggccg

SEQ ID NO: 767 - DNA, 63 bp, Artificial Sequence
  source: /note="Description of Artificial Sequence: Synthetic oligonucleotide"
atggcacttcccgtcaccgccctgctgctcccactcgccctccttctgcacgccgcccgcccc

SEQ ID NO: 768 - DNA, 63 bp, Artificial Sequence
  source: /note="Description of Artificial Sequence: Synthetic oligonucleotide"
atggccctgccagtgaccgcgctcctgctgcccctggctctgctgcttcacgcggcccggcct

SEQ ID NO: 769 - DNA, 207 bp, Artificial Sequence
  source: /note="Description of Artificial Sequence: Synthetic polynucleotide"
accactaccccagcaccgaggccacccaccccggctcctaccatcgcctcccagcctctgtccctgcgtccggaggcatgtagacccgcagctggtggggccgtgcatacccggggtcttgacttcgcctgcgatatctacatttgggcccctctggctggtacttgcggggtcctgctgctttcactcgtgatcactctttactgt

SEQ ID NO: 770 - DNA, 207 bp, Artificial Sequence
  source: /note="Description of Artificial Sequence: Synthetic polynucleotide"
actaccaccccggccccgcggccccctacaccggcaccgactattgccagccagcctctctcgctgcggccggaggcctgccgcccagccgccggcggagccgtgcacacccgcggtctggacttcgcgtgcgatatctacatctgggctccgctggccgggacttgtggcgtgctgctgctgtctctggtcatcacactgtactgc

SEQ ID NO: 771 - DNA, 207 bp, Artificial Sequence
  source: /note="Description of Artificial Sequence: Synthetic polynucleotide"
accacgacgccagcgccgcgaccaccaacaccggcgcccaccatcgcgtcgcagcccctgtccctgcgcccagaggcgtgccggccagcggcggggggcgcagtgcacacgagggggctggacttcgcctgtgatatctacatctgggcgcccttggccgggacttgtggggtccttctcctgtcactggttatcaccctttactgc

SEQ ID NO: 772 - DNA, 207 bp, Artificial Sequence
  source: /note="Description of Artificial Sequence: Synthetic polynucleotide"
accaccacccctgcgcctcggcctcctaccccggctcccactatcgcgagccagccgctgagcctgcggcctgaggcttgccgaccggccgctggcggcgccgtgcatactcggggcctcgactttgcctgtgacatctacatctgggcccccctggccggaacgtgcggagtgctgctgctgtcgctggtcattaccctgtattgc

SEQ ID NO: 773 - DNA, 126 bp, Artificial Sequence
  source: /note="Description of Artificial Sequence: Synthetic polynucleotide"
aagcgcggtcggaagaagctgctgtacatctttaagcaacccttcatgaggcctgtgcagactactcaagaggaggacggctgttcatgccggttcccagaggaggaggaaggcggctgcgaactg

SEQ ID NO: 774 - DNA, 126 bp, Artificial Sequence
  source: /note="Description of Artificial Sequence: Synthetic polynucleotide"
aagcgcggaagaaagaagctgctctacatcttcaagcaacccttcatgcggcctgtgcagaccacccaggaagaggatggctgctcctgccggttcccggaggaagaagagggcggatgcgaactg

SEQ ID NO: 775 - DNA, 126 bp, Artificial Sequence
  source: /note="Description of Artificial Sequence: Synthetic polynucleotide"
aaacgcggaaggaagaagctgttgtacattttcaagcagcccttcatgcgcccggtgcaaactactcaggaggaagatggctgttcctgtcggttccccgaagaggaagaaggcggctgcgagttg

SEQ ID NO: 776 - DNA, 336 bp, Artificial Sequence
  source: /note="Description of Artificial Sequence: Synthetic polynucleotide"
cgcgtgaaattcagccgcagcgcagatgctccagcctaccagcaggggcagaaccagctctacaacgaactcaatcttggtcggagagaggagtacgacgtgctggacaagcggagaggacgggacccagaaatgggcgggaagccgcgcagaaagaatccccaagagggcctgtacaacgagctccaaaaggataagatggcagaagcctatagcgagattggtatgaaaggggaacgcagaagaggcaaaggccacgacggactgtaccagggactcagcaccgccaccaaggacacctatgacgctcttcacatgcaggccctgccgcctcgg

SEQ ID NO: 777 - DNA, 336 bp, Artificial Sequence
  source: /note="Description of Artificial Sequence: Synthetic polynucleotide"
cgcgtgaagttcagccgaagcgccgacgccccggcctaccagcagggccagaaccaactgtacaacgaactcaacctgggtcggagagaagagtacgacgtgctggacaaaagacgcggcagggaccccgagatgggcggaaagcctcgccgcaagaacccgcaggagggcctctacaacgagctgcagaaggacaagatggccgaagcctactcagagatcggcatgaagggggagcggaggcgcgggaagggccacgacggtttgtaccaaggactttccactgcgaccaaggacacctacgatgccctccatatgcaagccctgccgccccgg

SEQ ID NO: 778 - DNA, 336 bp, Artificial Sequence
  source: /note="Description of Artificial Sequence: Synthetic polynucleotide"
agggtcaagttctcccggtccgccgatgctcccgcctaccaacaggggcagaaccagctttataacgaactgaacctgggcaggagggaggaatatgatgtgttggataagcgccggggccgggacccagaaatggggggaaagcccagaagaaagaaccctcaagagggactttacaacgaattgcagaaagacaaaatggccgaggcctactccgagattgggatgaagggcgaaagacggagaggaaaggggcacgacgggctctaccagggactcagcaccgccaccaaagatacctacgacgccctgcatatgcaggcgctgccgccgcgc

SEQ ID NO: 779 - DNA, 21 bp, Artificial Sequence
  source: /note="Description of Artificial Sequence: Synthetic oligonucleotide"
ttggcagaagccgccgcgaaa

SEQ ID NO: 780 - DNA, 45 bp, Artificial Sequence
  source: /note="Description of Artificial Sequence: Synthetic oligonucleotide"
ggtggaggtggcagcggaggaggtgggtccggcggtggaggaagc

SEQ ID NO: 781 - DNA, 45 bp, Artificial Sequence
  source: /note="Description of Artificial Sequence: Synthetic oligonucleotide"
ggcggaggcgggagcggaggaggaggctctggcggaggaggaagc

SEQ ID NO: 782 - DNA, 45 bp, Artificial Sequence
  source: /note="Description of Artificial Sequence: Synthetic oligonucleotide"
ggcggtggaggctcgggggggggcggctcaggaggaggcggctca

SEQ ID NO: 783 - DNA, 66 bp, Artificial Sequence
  source: /note="Description of Artificial Sequence: Synthetic oligonucleotide"
ggaagcggagctactaacttcagcctgctgaagcaggctggagacgtggaggagaaccctggacct

SEQ ID NO: 784 - protein, 22 aa, Artificial Sequence
  source: /note="Description of Artificial Sequence: Synthetic peptide"
GSGATNFSLLKQAGDVEENPGP

SEQ ID NO: 785 - DNA, 66 bp, Artificial Sequence
  source: /note="Description of Artificial Sequence: Synthetic oligonucleotide"
ggttccggagctaccaacttctcgctgttgaagcaggccggagatgtcgaggaaaacccgggacct

SEQ ID NO: 786 - DNA, 15 bp, Artificial Sequence
  source: /note="Description of Artificial Sequence: Synthetic oligonucleotide"
ggtggaggtggcagc

SEQ ID NO: 787 - DNA, 29 bp, Artificial Sequence
  source: /note="Description of Artificial Sequence: Synthetic oligonucleotide"
tatatatcttgtggaaaggacgaaacacc

SEQ ID NO: 788 - DNA, 30 bp, Artificial Sequence
  source: /note="Description of Artificial Sequence: Synthetic oligonucleotide"
tatatatcttgtggaaaggacgaaacaccg

SEQ ID NO: 789 - DNA, 30 bp, Artificial Sequence
  source: /note="Description of Artificial Sequence: Synthetic oligonucleotide"
ttatatatcttgtggaaaggacgaaacacc

SEQ ID NO: 790 - DNA, 31 bp, Artificial Sequence
  source: /note="Description of Artificial Sequence: Synthetic oligonucleotide"
ttatatatcttgtggaaaggacgaaacacca

SEQ ID NO: 791 - DNA, 31 bp, Artificial Sequence
  source: /note="Description of Artificial Sequence: Synthetic oligonucleotide"
ttatatatcttgtggaaaggacgaaacaccg

SEQ ID NO: 792 - DNA, 15 bp, Artificial Sequence
  source: /note="Description of Artificial Sequence: Synthetic oligonucleotide"
gttaatattcatagc

SEQ ID NO: 793 - DNA, 9 bp, Artificial Sequence
  source: /note="Description of Artificial Sequence: Synthetic oligonucleotide"
cctgaccca
